United States Patent Application Publication US 2025/0295137 A1 - sequence listing, part 5

SEQ ID NO: 5 - DNA, 1887258 bp, Latilactobacillus curvatus
  source 1..1887258: mol_type = genomic DNA
tattaagcatgactttttgatactaaccatttaaaaatctcattaagtaaagtatgatagttttagaggaaaatgtaatgatatcaggttatacagctctttacggcttggttgcgcatccagcgcaccatagcttgtcacccatgattcataatctgggttttaaacaacatcaaatcgacgcgcggtatctggttttcgatagccaagcacggccgcaagatgtcgcaaaagcgattcggacgcttggtgtggcaggcgttaatctttcaatgccctataaacagtcgcttgtgccattaatggacgagttaatgccaactgcgcaactcgttggcgccatcaatacggttgctttacgatcgggtaaattggtaggcacgaatactgatggcgatggtttttggcgcgctttgcagaaaagatatcccaatctagctagtcagcagattgttattctgggtggtgggggcgctgctctcgcggttatcgaagccgccgctcgttatggtgtggcgacgattcaggtcttcaaacgtcaaaatacgacttatgcggcggttgaacaacgactggcaaaaattgctaatcaccattcgatgtccatcgtgctacataattatgccgatgaacaggtactccaacaagcactcagtaatgctgattgcgtgattaacgccacgaatcttggcatggtcaatacccctggattaccgctggcagcacctttaattgatcaaataccgatgacttgtttagttgccgacttaatatatgcgccacgtcagactgcttttttacagttagcggctcgaagtggtcatccaacccaaaacgggcttggcatgttagttgaacaggccgcgttgagttttcaattctggacgggccaggtcctacaaaccgatcccatctatcatgctttaacgaaggagttttaataatttatgattattcaatttaaaccaaatactgattcagcgctgattgatgatttttgcgcacgacaacgcacgacaaatccgaatgtctatcagattaagcaccatgtagcggtgatcggtgcaaaagcaattgattttaccccagcagaggaagaagtcattgcggcaaccaccacggatgaaccgagttacgtgcttggcagtcggctattccaacccgaaaacacggtcatcgaattagcacacagtacgattggcggtgcagacttcacggtgatggcgggtccttgttcggtcgaatctgctgaccacattatggcgatggccaaagttgctaaagaaggcggtgcgactattttgcggggtggcgcgtataaaccgcggacatcaccgtattcctttcaagggatgggcgaagctggtttgaaagcattgcgcaaggctgctgatgcttatcaaatggacgttgtgaccgaagtgatggatgaaacgcatgttgatttagtggcgcaatataccgatatttttcaaatcggggcgcgcaatatgcaaaacttttcattattgaaagctgttggaaaaaccaacgttcccgttgctttaaaacgtggcttagcagcaactgttgatgatttattaaatgctgccgagtacattgctgccaacggtaatcaacaaattatgctgttagagcgcgggattcggacgtttgacaatcactatacgcgcaacacatttgatttaaatgctgtcccagttttacaaaaattaacgcactatccagtcttaattgatccgagtcatgcgactggtgaatgggatcttgtgacgccaatggctcgggctggagtcgcaactggggcaagtgggttacaagttgagattcatgatcatccagaaaaagccttttctgatggcgcacaagccttaaagccagctacttatcttgaaatgtgtcatcaagtgtgggccgttgatgcagtcgtcaaacagtggcggcactaatggtgataattgatgtccacctcacacaaaaaaattatcagattcggatccaatctggtttgtatcacatctgtgctgaacaaatcgcgcaagtttggacacctcgtcaaatcgcattaatcacagacacgaatgttgccccgttgtatttagaaacggtcgaatctcaattaatccaagttggctatcaagtcacaccgattattattccggctggtgaaacgtcgaaatcacttgaccaagcaatggcactttattcccaactggcagcggcgaattttacccgtcatgacggggtgattgctttaggtggtggggttgtcggtgatttggcggggtttatcgcgtccacctatatgcgggggattgcatttattcagatgccaacctcgcttttggcacaagttgacagtagtgtcggtggaaagactgcacttgatttaccagctggcaagaacttagttggttctttttaccagccggatttagtattgattgatcccgactttttaacgtcgctggatcaacgccaattactggccggttatgcggaaatcgttaaagtggctgcactcaacggtgggacattttggcaacaggtgacagggattcaaagtgcgcatatgattctagcgcaggctgaaacactaattcagcaaagtgtgcactacaaggcacagattgtcatggccgatgaaaaagaaagtaatcaacgccaattattaaattacggtcatacgattggccacgcggttgaaaccctggccaatggcagcctgatgcacggtgaagcggtcagcatcgggttagttgccatgcagcacttagtcgaacaaagtggactgactgaagcgcatttaacaccagtgattacaactgttttaaatgcggtcggcttgccgacagatagcccgttacttatgagtgatcgactcttcacgcaacttttacatgataagaagaatcaaggagatgccattaatcttgtttacctcgatgcaattggtgttccaaaaattcaatccataccgctaacgactttagcggctaatctattttcaaaaaaaaactggtaaccaacccacagataccttacaatgaaactaacttgtaaagagtgtttaactgaccgtatgtgcggagcagtcttggaaccaacaatatatttgaaatagaaccataggggttgattgactagatgcaactgattttaatcggttttatggggtctggtaaaacgaccattgcacgcaaagttgcacatcattaccattgtgactggattgatttggatcgctacatcatgcaagaacagcaaatgacgattaacgaaatctttgccgaaaaagggcaggctgcatttcgacaaatggaatttgaggccttacagacattgatccaacacgatgggattatcgcaaccggcggcggggtcgtggatgatgctcagacgcgccatttacttgaacagagtcatatccccatttttttcctaaatgggagttatgaagcacattggcgccgcgtttcgcgcaatgatcggcggccacttgtgaatcaattgggccacgatggtttacgcgaactgtatcacaaacgacgaccaaagtattatcggcttgcggactacaccatttttttccaacataagacaccgaacatgatgttggcagaaatcgatacgcagctacccaggattcaaaaaaagttggctaataaacattagtcggcttttttcaatggtcgtagaatcatattattcgctttttaacgccatagacttgtatgatgaggttataacaaggagggtgaacaatgacatttaaattaccagcactaccttatgaatatgtggccttagagccgtatatcgattctgaaacaatgcatctgcatcatgacaaacatcataagacttatgtaacaaaactcaacgcggcgctagccaagcaccccgatttagcaggtaaatcattacatgatttgttaacacacatcgatgatttacctgagaatcttcaagcacctgtccgcaataatgctgggggccatgccaatcatagtttcttctggcgaattctaacaccgaatgcgccagaagcaccaacgggggaattactcgaacggattgaagcccgctttgggaagtttaagacgttccaagaagcattcaccgaagctgcccttggtgtatttggctctggctgggcatggcttgttatcgatcaaaatggtgaactacaaatcatgacaacgcctaatcaagattcaccacttatgagtcgtaatcgaccactacttggacttgacgtttgggaacatgcgtactacctgaaataccagaataaccggattgattacatcgaaaacttttggaagatgatcaattggccattggtagcggaattactttaataagggtgttcattataatacatttataactgaataaaataagacccatcacttaataagtggtgggtcttattttattttacacaattgtaaacactgtcatcacaattatagagcgatttattcttaaatgtaatagttgtagttatcattattgacatttttaatattaatggaataattatagaaatcattagggttttttaatagacaattttcagcagtccatgctaatctgaatatgttataaaaataataatacttttaggggatgagactatcaagaatgtaatcggaattttagcgttaggaatcctaacaactagcaccatcagttctatacaaacagttaaggctgaaccaagtgacaatcaccaaaatttagcgagtagcgtgctagcagatagcctcaaatccaaggtgaggcaccagcaaaatctaaaagcaccacaagaaatgaaaacctatattggtcgtggtgatgtttttaaagaaaaagaccggcaacgcagaacattacgctactcaagtttagagcctagcggtttatacgcccaaaaaggggatgttttgacagttgctcaggggatgcaagattcattatctatcacaattggttcgcccgaacgagaaaatcaaaaacaatatccattaacaaagggcattacaacgattaccgttgaaaacgagggcccgatttatgtgactaatcctaatgattctggtgaagcaacaatcacaatatcaggggcaacaggatcaatgccatatttcgatttaaatcaaactagcgtcgcagactttgagaaacaaatggcggaaatgacgaatgctaaagatgtgcagttggtcagtaacaaagcattaattacagttagttacgcaatggctaaaaaatatctcggtgaccctaaagaactgatgacttattatgatcggtttttaacggcacaagatcgggtttcaggcattactactgaaggaaatccagtaaactttgttgatcgccatctccaacatttcttagagtcacctaagttgtatatgtatacagaaaatgaatttatgggcttccataatgatcgcgctttgcaacgactactgaagacaaatgaaggttggagcatctggcatgaaagtggtcatcagagacaacaaacaccttggaaatggggtgctgttgtagaatcaagtgttaacatttatgcattagcggctcaaaaagaattgactggtaaaataacatcgttagatcaatactacccagaaatgcatacttatctaaaatctgataataagcaattcaacgcacaaaataataatttaaagatggttatgtttggtcaattaggaaatacatttggtgataacttttaccccgttttacatcaatactatcgtgaaaacaagcttgcatttggaccagacaatgaacggatgcaaaactttgttctaaatgtttctagaattacgggttataatatgcagccttatttcgaacaatggggatttgatatttccgcagcagttaaagctgaaattagtcaattagcacctttaccagaagctatttggttaaatgataaagaaactaataaacagttacccatgcgcttaatcgataccgtatcgctgaatgaccacggtattcaagttaacctgactgactaccaaaccgatgtatttaaggatgagcaattaatccttaaaaagaatggacaagtgatttccaaactcgtcaataaagagccaattgaaagtatgttaacaaataatgtttgggaaacaatcgagatgcttaaaccgactgatgtgattacaattgaacagcaaaataaaaatggtacttttaaatgatatgaacactcaattgatagtattgcacttgaagaagagttattaaactatttgaatgcatcagaaccgattggtacaattctaacccaagctaaactagatgctctccgaaatcgaattgatgctcttccttctacttttgactataaagaaagactcttagaactatttacaaaattagaagacaaatacctagctacattagtcaaagatattcaactggattcacaatcagcattagtggtatcgtttactgatgagaagtttaaagactatgcgaaaattaaggtacttgttgacgaccaaccagttgcagaggtcaaaaatggtatcagtagtggtggtcagctcgacgataatgtcttaacaattcctaaccaagcggatgcacatgttgttaccgtagtggctgaattaccgcacaagtcttacattctcaaaatgattagtcaggatattcttcttctgaaacgtcaagttgaagcgttatttgaaacaaacgatcagttgaaacctgaggtcacacaagacctattagattaattacgaacacaaattaacgcagttaagggctcggaaaagacgatattgactcaaagaattaaccatgcacagcaactgttcttgaacactttagttgctgacatgagtgttaaaaataataaaatcgtcgttacctttgctaacgaattatttaagcattataagatagtcgtattaggaaacaacagctatctggcagaagtcaccaatggccaaaactactatggttccctaaatggaaatgtatttactccttctaaatcagttgtccatggacatccttatcgggtagaagttagacacgcaagtggaacttacaagattagagagatgattgctgagtaaataaaatggtcccacatcaaaatacgatgtggggccatttttatctataaattactatccgttgtaaagttgagtggtgataggttcgcgctatccgtaatcagttttgcggtgaggcgttccatttcgtgttgggcaagttgcgcagcttttgcagagcccttggtcatcaacatcgttcgttggaccgcatcggtttcagcagcaaccgcttgatcggttgttacgatattttgaaccattaagctattgatgtgtttttgcgtttgttccaagtccttggcgaacttggcgtagtgtgcatccaccaaaataccagctaatttataggtccagtagatcgaatcttgactgtaatcctttgtccctttttggtaattgactgggacgtcatcggcacccgcatagaatggcacgtagacactttgtgccgtgacacccattgataaccagtgaagcccgctgacatcgaccggtaagttagggcgcatttggagaatgtgtgattcttgcgtctttgctaaactaattgggcggaaagcatgtttttcttgtggtgtgccgtgaccgattggatcgtagaccgtgccttcataatgcgagcctagaattcgcgcgacatcttcgacttgaatgggcgcatcggcttgccgtaagaaggggaggttaaagtcttgaggttgttgtgcgacagatggcgttaacaatttttgaccgtaccaaacgcgcggtgtgttgtaaacaaggtcgctttggtctttggtcccaaagatatcgcggaagttaaatggcgtatcagcttgccataggtgattatcacgcacaaaatcttgaatcccgtctgaagtcatgaaccaatccggttgatcgaattgcacttcttgaatcgcgagttgattggcaaccacggcatagctatcatccggaatccgttgggcaacccagtgatgtccactgccgatttcaagataccagacctcatcgacatcggaaaagagaatcccgttactttcagtggtgccgtattcactaacgatggcgcctagccgcgcaacaccttcacgggccgttttcacgtaaggtaagacgactgtaatcatggattcttcagcaatcccgttgtcgatgtaggggtcaaagccgagaacgcgactgttgctataagcactttcggtgccgctcatcgcaacgccgtattcgttaatgccgtcttcttcgaatagtccatattcatcggtccattcgggtgtcgccgtgtattttgcggcttcaagtggtaaatcgattgaaaaacccgtgtcttttgagacaaagtgcggggcagtcgttaacttttgatggggatggatggttaaatgtttaggccaagctgcctggctatcttcgttacgtgcgattaaagttgagccgtctgcagtggctttcttaccaactaaaacactggtacaggccgtcaattgacggtaaaggggttcactcattgtaatgcctccatagataaatcaatattagctattattatacattcttttgcttaaaaacacagtaattaccgttgctcaattgcgttaaaacaggcataatataagtattcaattaaaggaggcaccacacatgccattagtacacatcgatttaatcgctggccggagccaagcacaattaaaacaactctgtgcagacgtcacagaagcaatcactaaaaacacaggcgcacctgcagaacacgtgcacgttgtcctaaacgaaatgcaaccagaccactactcagtaggcggcgtgctaaagagcgacgaaaaatagagtgcgacgtcagatggtcatacgctgaggattagtctaataccgtgaatgagcggcgtagccgatcgtttgcggtatgtaactaaccggaagtgtatatctgacggagcacgtttcagaatagagtgtgcaataagccgggtatcttctgaggattagcctaatcaggcagattaccgacaaaatcggtgatttgacggatgtagctaagcacagaaagttagcttgaaaagcacgtttcatccatcaaaaaaagcgattcgaccagaaattgtcgaatcgctttttcattaatccatcttaaaatattgccgtaaataattggccacaccatcttgcgcattcgtcagtggtgtgatgttgtctgcaatcgccttgatcggtgcaattgcgttttgcatcgcaaccccggtaccggcataggctaacatatccaaatcattactttcatcaccaaaggcaatgatatctgattgatcaatgtcgtagtgtgccgctagttttgcgaggccggttgctttgtgaatcccatgatgcacaatttctaagacgctagcaggaccaccccaagtgttgacggaaacgtcagggaattggcgcagaatttcagcacgtaacgcatcttgatcagcgcgttccacaaaaaccgtgacggccgctgggtcttgccgaagcgattcgcgggttaaaatttcatcggacttcaacgttgtggggaagaaagaaaacgtgttggcataagcttgatcagctaaaaacatcgttttaccttcggcggcaatcatttgaatcttaaagcgttcttttagttggaagagactaaagacaatgtctttattaatcgtatattgatattcaccggcccaggcttgtcccggaatgtgcattaaagccccattaaagttaaccattggcgacgttaaacctaattgttggtagaaaggttcactcaaacgatttgggcgccctgtgacaatactgacaatgtggccagcgttttgtaattcagttaaagtttgttgcgttttaagtgtaatttgggcatctgaattgagggtagtcccatctaaatccagtgcaatcaatttttgatgcatagcggcgcctccttttaaaaacgtgtttggttaaaacacgatatgtctttttattctagggggtatgcggattgttgtcaatgatcgtcagttgtaactggtcggttgaaccagtataatagagctattagagtgaccaggaggcaggacacatggcagaccaaccacaagatgatgcagcaattgaagacttaaaggaacggattctagccgcgctcgagaccgtgattgatccagaactcgggattgacattgtgaatctcggcttggtttacggtttaaacctggatgaaaatggcttatgtacgattgatatgacccttacaacgatgggctgtcccttaaccgatgttttaacggattcgattcatcaagcaatgggcaaaattccagaagtcaatgaaattaaagtcaatctcgtctggtacccagcgtgggataccagcaagatgtcccgttatgcacgcattgcactcgggattcgttaaaacgttcgatttggccttccgattgggaaggtttttctaatcgtttaagagaaacttatattagaaacggaatccattatgatacagttaagttatccagagaaattgcgccagagtcaacgtttttttgcaaccgtcccagccattcaagtacaaattcatgctgttttaactagtttattgcagattgaacaggacggcttgcccatacataatttacccgttttgggaattgatgaatctctgtatttagaaatattactccaggctgaacagggggcttttagcgccgctagtgtggctgaggttcaacgtcagttacagttaatcgaccacttactgcgcaattaccgtgaatatttgcaaaatcgctttggcatgtgggcctatatcactacagatttgacggcggcgattgtccgcgagtttcccaattggcgttttctagaagtcatggctggtaacggctatttaagtgctggtttacggcaggcaggcgctgatgtgatttgtaccgatagtttagcctggactgccgagaatgaaacagggcgccaattagtcacgtcagtggcagctcttgacgccaaacaagcggtcccaaaatatggtccgcaagtcgatgcagtcttaatgtcctggtcacccaacggcgtcccagttgattatgaattgctgcaacaacttcgtgcaatgccaaatgcccccgttttgttgtgcttaggcgaacgttttggcgccacgaatagtcacgccttttggacggcggcccattatcacaacgacgcccgtttatcacggattaaccgttacttacgcccattcgatttaatgcgtgatcggttttactggattcaatagtctgctttaaaggagggcccactgtgcgcctgaaaaaaataatattagattgtttactagttggtttaacagttctaggcatgttaacgattagccaacgtgcaaaaactaactatagccaacgcttaaatcacaatagtttatcagaaaatgctgtgatttttaattctaagagtcaacagtcgattcaaaaaaccattcaaaaaattgatgccgcgaaattaagccattttcaaattcaattcaacgttgattcccggttctcatatgtctatgcgaaagggaagttatcgagtgtcccattaaaagacggccggttcttctccagttacgatttcaaatcacagattccagtcgtcgttgctggtcaatcacgacttgctgaactctacaaaccagctagtcaagcgtattatcaagatcatggtcgctacttatccgtgattggcgttgtcggtacgaatcagacaactacgcttgatcagcacatttttgtatccacgtcaccagaatttgtattaaatgatcgcccactgaataaagtcaccgtattggttgatggtccgcagatgggagcgcatctgaaaacttaccaaaagattttcaaaacgactaagcacagttatttaacaccgaagacgacgccgttagtcggcgtcaactggctccgtcaaaatgcgggtgtaatcgcggtaattgccgtcctcatgatcatcgcggtcggtttcacttatttatttagccaagttatcaatggttatcacgcacaaaaagggctcagcactggtttatatcgtaaattccgcgtggcacaaacccaaatttttgcgctgcacctagttgttagctcaatcattggcttctcaattggtagttggttcttttacctaacgggtcgaacagcgatttttattggattgatgatcattgatctcatcttaatcggtatcttttattatttaattccaaaaggacgaaaaacaacatattaaaaaaacggtttagtcattagattgactaaaccgtttttttttaagggttaaactttacgccgtggttcaataaaaacagcgcatgcgccactgataaatacaagactgaatagagttgtaaaccaatctcgaactgctgttaagcggtctggcacaaaagtcataaataaaatcatcgataataaacacgctgcaaacatcgttttaaaaacgcgatacataataagctgtgagcgttcatccgaacgtccaattctagttataccatagtagaaaaacagaattgaaatgatgattaatccgattgccacaccagcgattacatgggcattttgatttaaaaagtgtagtaggggccatattgttacgcctcccgataagtgaatagaacgtcaattggtacatcaaaaaatcgtgcgagcttaaaggctaaaatcaaactaggtgagtagttgcctttttccattgcatagatggtttgcttggaaacaccaaccgcttgacctaatttttcttgagaaagatgttggagtactcggtattcatagactttattttcgacataattcgtttctttcaatatgcaccacttcattatcaaagtttacttatacttttaacaactatatttttacattatccaagttaatttgtcaagtgctttagcgaatatccaaatttaggcattactgcaaattacagtatccaacatcctgttgtgcaacctgattataataagttccccaagttgccattgcgttaatcacgggactcagtgtttgaccaaattcagagagttggtattcagtctttaacggccggagactaatcaccgttttagtaatcacatgatccgcaattaattcttccagctgtagggctaacatgcggcgcgaacaatcgggtaaagcgcgcgtcaaatcatcaaaatggagatttgaatgttgcaaaagttgataaataatcacacttttccatttacccgagataatttgaagcgtgctttcaaccgggcagcccgcctgacaatcataaatgtgccgttcttgaaccatgaaatggcctcctttgataccgccattatagtccgctagcagtcatttgcctagtgaaaacaatgtaactcgttacattcgatacacgattgttacggggcaattaatgttttagactaatggtgaataagaaagaaggcatttttaatgcaagcaattggttttaccaaacatttaccgattacaaatgaagaaagtttaatggcttttaatctccccagtcccaaaccaaaaccacacgatttatgcgtacaagtgaccgctgtttcagttaaccctgtagatgttggcgttcgaaaagggggtagaggacaatcaaaaacgccccgtattcttggctgggacgctgttgggattgtcacaggaattggcaatgccgtcacgttatttaaaccgggtgatcgtgtcttttatgttggggactttaaacgaccaggtagtaatagcgaatatcaattagtggatgaacgaatcgtcgcaaaagcaccgcagaatttaacggacgcgcaagctgccgcgatgccgctcacagcgctgacggcttgggaagctttatttgagaaattacacattgattttgaagatcgaaccactaatcatgatcaaaccatcctaatcattaatggggcaggtggggttggttcgatcgccacccaactggcacatttggccggattgcacgtgattgcgactgcctcccgtccggaaacgcaaaagtgggcgctggcccatggtgcggatcaagtcgttaaccatcatcaatcactcattgaacaggtgcacgcactcggctatcaaacggtcgattatatattagagttgaataacatcgatcaacactgggagagtatggcgcgcctgattaagcccaatggccgcatcgcttcaatcactgaaaatcatcgcccggtcgatttacaaaaattaactaaaaaacgggtcgagttcgcttgggagtgggttttctcaaagacctactatcaaacaacggatttagcgagtcaaggcattatcttaggacagattgcaaccttattggaacaaaacaaattgcaatcaaccctgacaaagtgcttaagcccaatttcagcagccaacttacggcaagcgcatcaactggtcgaaacgaaccaaatgattggcaaagtcgtagttgctaattaagcaatcaaataaagcccggtagaagaaatccttctaccgggcttttgctgcttaaaatgttatgtgccgttcattcaaataatgccgtaattcaggcgagagaataattggcgccttttggagcgcttgaatatcgcgtgcgccaagcattgccataatctcttgaatctgcgcttgccaagtgagcaagttttccgccatttgtgtcgggccttcttttaaaaccatgtgcaagaattgaccggaaatcccaacagcactggcaccaagccgaagtgctttaatgatatctaggggattccgaatcccacctgaagcgaggatgttgacgtcattttggaaagcgcgtgattcaaagagcgattcgaccgttgattggccccaatcagctaagtaatcgtaggctttatcatgacgccgttcgttttcgatcgtgacaaagttggtcccgccacggccagaaacatcgatgaattgtacaccgatttgcttgagttgcgcaatcgtatcagcactcatcccaaaaccaacttctttcacgataacgggcacaccaacattggcgacaatgttagcaatctcgtctaaccagtagaaatcttgatcaccttcaggcatgacaatttcttgtggcgtgttgacgtgaatttctagggcattggcttgggtcattgcgacggcttgcttagacacattcaaatcattaccagcaccaatattagcgagtacaaacccgtggggattgaattcgcgaatcacgctaaatgtatccgccagtgacggatctttaatggctaccgattgggagccagttgccattggtaggttggtaatttgggcgacttgcgctaattgtgcgttaattttctttgtctgctgactaccaccggtcatgccgttgatataaaagggactggcccagttagtcccggcaaaatcggtactgatatccacgtcggataccgcaatttcgggtaagctttgatggataaaccgaattccatcaaagtcattgatggcatcaccatggcggaatttttccgctaaaaagacatgttcatctttccgatgagattgaatggattgtttgggtctgaccatgggtaagctcctaatctacgaggtgaactgcaaggttcaatcgttcaatttgattggcccgccattgttcaaagagggcctctgtttcgatagcgcgatcaataatgacaatcccacaatcaccaccgccagcaccagatgttttggcagcaccgccgattgcctcggctaatgcgcccattttctgtaatattggcgtttcaatagcgacgtgactgaagtgagcgagatcttgtaaaatggcacgattgtggcgtaattcagcttggatctgggctaaatcattacgacgaaacccttcgaccatcgcttctaagcaagctttgctagctgcgaggaagttttgataatcggcttgccgttctgttttagcaagggcaattttatccaccaagtgcgaggttgaagcgggcgaccccgtccaaccaatcaagagtgacaactctgctggcggtgttaataattcgattgaaagactaggccatggcatttcgagcagctccgttagactaacagttggtcgaatgtcagcaagccattgtttatcaaatgaccgataagcgacccagccaccaaaaacactagcagcaatgtcgcctaaagaaccgttgccctgcacatctaaatgcgcaatagcagcaagtttatacaattggtcgtttgatagtgataattcataaaaggcgcagagggcttttaccgttgcaacggttacggcggctgaactgcctaagccgtattttttaccatcagcagagtctaaatcactatttacccgtaggtggtagacgcgcagtgtcttacccgcttgacgtgcgtattgttccgttaagcgaatcgcggacaaaatataatggaagggattatcgcggttatcaaaaaccatttcatcaccttgtcgttgccaataaagggaattttcttggtattgtttagacacaatactcccatattcatgactctcttcaattgtgactgtcacaaattgatttaaagccacgataatagccggaaaacctgtttctactactgcgtattcgccagcaatatacagctttccgggcgctttagccgttatcaaaccatcagaacctttcacgtttaacttaaatttgcattatcgatagctcacaccaggacctggtttagcaacaaggagttgttcaggactaaaatagggcgcaagcgccgctaaaatctgaggtgtttcctgactggtacaaatcactttcacgtttggaccagcatccatagtataatagcaagaaacaccctgttggcgcaaggtctgcacgactttaattgcttgtagggtttcaggttcaaaataggtgaaaggtgggacggcactaagggttgtcgcatgcatctgcatcgcactttgttctgctaattgccccaccaaatttatatctttcttaacgattgcggccttcattgccggaattgcggcttgagcggtttcaacccatgctgggtagtagggcgacgtggccaccgtattcgccatcccagcacgactggcgatggctttttgacgatcatttaagacaatcgcaatcatctggatgtcccaatcaactgtttcttgaacgggaacagcgtatgaatccaaatcattggtcccacgttgccattccacaaaaccaccataaatcgagcgggttgcagagccagaaccacggcgggctaatctcgaaagatcccgatcgttaagttcaagcccagctgcacgactacctgcagcagctaatgccgcataaccggaagcagaagaggccaacccagcagcattggggacatgattaatggtttccacagcagcaaataaaggcagatgcgcctgttttcgaattaaatcgagaaactgactcatctgcgtactagttttggtatccgcaatggcaccattaaagctaatttggtcagcagtcaaatcagttgaaaagcggaccgttgtatctgtataaaaatgatctagcgtcattgaaagactactgttatacggaataatcaattccggattttgttttccccaatacttaatgagcgcaatattcgtatgtgctctggctgtaattgattgtcccatagtaatactcctaatgtttttttaaagtgcgtgtagtggttgaatccaagttttgatggcaccagctgctgataaggcttgtgccaaatcatccgcagcactttgcgtagcggccagggcgataatgcagccaccacggccaccacccgttaacttagtgcccaaactaccggtctgattagccacatcaatcaaatgatcaacacgggcattgctgacaccgagtgcccgcaaatcaagttgagcacggttgaggttcgcgccaagtaccgttaattcgttttgggcaatatttcttgcgacttgttgcgttagataacccaaatggtcaattaagggttgcgtttgttctggattggacatcatttgattctgaacgcttttgacggcggcacctgtttgccccttttgaccgctgtcggcgattacgagatacccttttaaattaatgggtaggggttgaagcggctgccctttgacaaaccataatggtgtagttgcgccggttgtcgcggcgtcaatcccgcttggattaccgtggattaaattttcggagagcgcggctagctttagcagccgttgttgactgagctcttgatgataagtcgcaaataacgctcgaatgatggcgacggccgttgcggctgaagaacccatcccgcgttcgggcggtaagtcactttcaatcgtcaattcaaacggggttaagttcggatctaatgcatgccacagttgttcaattaaccggcgaatgccttgcatctgaccaacagcctgttctagaggaccattgtaataagtactcttaatttgcggtgtctggagtgccggctcgagagttaccgttacccgcgcttgaaccgcaaagatggggagggcaatcgcaggttgtccataaacgacagcgtgttccccaattaaaataattttcgcatgactttggccaacaccagtctgcatacaatcacccttaatctctttttctgacttgaagatacccttactactatactgcaaaacaaaaatgaccgccacataaatcaaattgggcacaggttaatgggtttcctattatacccgctttttaccaacggactagccggattttatcccaatcacttgtctatctatggtaaaatgacgccaaaggagtgtgggcgccatgagcttaaaatttattattggtacagctagttatgaccaccatcaaacactagtcaagcaactacaaacagaccttaaggccaccaacacggaccgctttttttatttggtcccgaatcatatcaaatttgaatctgaagtcgcacttttaaatgacctaaaaacccctggaagtgagtatgtcgcaacctcacgcgtccaagtcttctcattaagtcgattagcttggtatttcatgaaaaataccccgtactaccagattccgcggatttcaaccgccgggttaaacatccttgtctaccgcctcttgcaagaacatgcagaagaactcagcttatttggtggggaagtcaatcaaacaggctttgttgctcaattaacgagccaactattggaacttaaagtgggctgtattacacccgatgagctaactgagattgcggcccagctagcgcccgaagaagtcgaactgactactaaattgcgggaaataaccattattgccacggcgtttgaagccgctatgcaaaagcaattcatcgaaaatacgacgttaattgatgccttaactgattatttaaaaaaacaagacttacacgattgtcatttctatatcgaaggtttcgcacaattcacggctcaagaacaagcgctagtcgccgtcttaatgcagcaagcaagcttaaccgtagccttaattaccgactatgttaattaccaacaaccaccggaaaaactcagcttcttttatcaagctgagcgtacgtattatcaattataccaacaggccaagcaaaatcacattcccatcatgactgatcagattgccactaaccagcgggtttcaccaacgttactcgcgcttgatcggtactgggttgcttctgaaaaccacggtcagatcccaacagcaccggaaatcgattcgacgcaacttcaagtgatcggtgccgaaaatcggtataccgaattacggtatgttgcccgtgaaattcgtcgtttagtccaaaccggccactatcgctaccgagacttcttgattatgactcggcatttagccccttatgaaacaatgattgcgccgatttttacagaatacgaagtgccgtacttctgcgatttaccggaaacaatggcggcccatccacttgttgcgatgttggcagcgttgtttgatgtgaaagagcattactaccgctatgaagatgtaatggcgcttttgaagacggagcttttaataccagatgactatcaatcagtcgctgaattccgggctgatcttgatttgtgtgaaaatctgattttaaaaagtgggtatgaagggcatgattggttaagcgcagccgattggcaatattatcggttcggttccttccaagatggtgttcgaacaacagaagatgaagtgctcacggaacggatcaatcggattcggcattatgttcaatccgtattaccaccattttataaacggttagacagtgccaaaacagggcgcgatgccgctaaagtgctctatcaattcttaatcgaacaaggtgtcgatcgacaattgttaaattggcgggaccaagcactcgcagccaatcaaattgccttagctggccaaccggaacagacatggcaaacatttatgacgatgttggatgaatatgtgacgttattaggcgaccaacctttcgaactaaagggcttttgggatttactagcggccgggtttaatacggcgcaatatgcgcaaattccatcgacactcgaccaggtcgttttatctgaatcagggatggtgcagactaaacgccgcaaaattacctttatgattggtgcgaccgatcaagtgatgcctgatcagattgaaaccagcgccttattatccgaccatgatcggcaactattaaccgatcggttcaattcagaacaattcttaactgatccaagtgccagtcagatgagctttgaaccttatctgaactacttggcctttttaagtggtactgaaggattgtatttcacttatccattgaataatggggaaggggcgaactacacggtatccccctatgtcgaccggattaaaaactacttccatttaaccgagcaacgcgttctagcagaagtcattccgacaagtacagcgccaattacgggttcttggcgtagtttgttaagcgatttgattcaagttgcgcgacaagcacaagcgacgcaaacactaattcctgaccaatggcagactgtttatcgtttattacaacaatttcctgttagtcactacttaaccaatcaactccttcaaagtctggcgtaccataaccaacccgttgcactgacaagcgatattgtcactgggttatatggcaatgaaatccatacgtcgatctcgaaattagaagagttctatcaaaatcaatacgcttatttcttaaaatacggcttaaaactgaacgagcgcccaatttttgaactgacacctgcaaataccggtgatttctaccaccaagtcttagatcaatttatcaagatgattcaagcccaacgcttagtcttactcgatctcgataatcaacaaatcgatgcattgacggatgaaatcttacaaaaagcgtatgaacaaccagaatttaagatcctcaataaatcagcgcgaatgggctacattcgccaacaattgagtcaaacaattaaacgcgtcagccggacattgcgcgatcagagtcaacgaacgaacttaaaaccgttggcaaccgaagtcttattcggccaagttggtgcccaacaaggattagctggtctagaattcgaattacccaatcaacgtcgggttaaggtgcgggggaaaattgaccggatcgatcaactgacattaaacgaccaagcctacctgggaattgttgattacaaatccagtcaacacagctttagcttccgcgatgcatactatggtttggcattgcaaatgttgacataccttgaaactgtcttgcaagatcaagcagcaattttaccagcgcaaagcaaggtaaaaccagccggggccttttatctgcaccttcaaaacccaacaatgtcattgaagcaactgaacaaacaaaaactcgctcaactacaaaaaggcgaactcgatcaattattactggatcaatttaagtatgatggcttaattttaaacgatgagaccttactcgaaaacttggatacagctttagaaagtggctattcaccactgtttaacttcaatcgtccaaagagtggggcattcaaatcgaaacaactggtcacccttgatgagttacagcaattaattgcccataacgatcaactaatcaaagcagcgggggaagcgatttttgctggcaaaaatgctttgaatccgattatgcgacccgaccgcacgaatgcactcacaatgtcgccatataaatcgattttccaattcgatgcgatgttaccagaaaataattatcgccaattaagtgcgcttgataatcaagccgtcttagccaaaattatgaactcggaggaagaacgacatgagtgatcgccgatttacaccaacccaacaagcagccgttgatcacgcggggcatgatatcctcgtttctgcctcggcgggctccgggaagacaaccgttttagttgaacgcgtgattcaaaaaatcttgaatggcactgatgtggattcactattggtggtgacgtttaccgaagccgccgcatccgaaatgcgccaacggattcaaacggcactgcgaaaaaaagcaagcgaggcaaccgacaaagcggtgcaacaacgcttacggcagcaactcagcctagtcccgaccgcacaaatcagcacgttgcatgcgttttgcttacaagtcattaaacatttctactacgtgattaagttagatcccacgtttcggttattaagtgatactgcggaacgtctcttattagaggatcaagtttggcaacgcgttcgcgaagaacattaccagtcaaacgacgccttattttatgatttagcgcaaaatttttcgaacgatcgcaacgatgatgggctaaccaacattgttttcgaactgtttaacttctctggtgccaatccaacgcccgatgaatggttacaatctctaaccgccccttacgaggtaccagagactggcctaacaaccagtgcttatttcaaaacaacgattctgccaaagttagaagcgaccttggcaacctgtttaaaagacttggcactcgccaacgaactaagtcaaacaaacgagaaatttgcggtatacttgccaactatcgcaacggcacaagcagcactaactgccattcaagccaacgcggccactttaagttgggcgcagtggcgcacacaattgaccgacgcccaattgggacccgccaaacgaactaagaaattagaacccgatgaacaatatgacaaggaccggatcaaaaacgccctcgataatgtcaaaggggcactaaacgatcttttaacaacctattttgtctttgacgaagcacaaaccagtcagattcaacggcgcgctggtgagttagtcggtaagttagtgacggttacccgcgattttaagcaagccttccaagctgagaagaaacgccgctatttactagattttggcgatttagaacatttctgtttggatattttggccggtgacactccggaatcagaggcagcacgaacgttctatcaaaataaattcagtgaaatcctggttgatgaatatcaagatacaaaccagttacaagaaacaatcattcaaactatcgctagtcaagcaccccgcaacgtcttcatggtgggggatgttaaacaatccatctatgcctttcgattagctgatccgagtttgttcctcggtaagtacgacgaattcgccaagccagataacgatagtgaacgcattattctcgcagaaaacttccgttcacggcgtaatatcgatgatttcgtcaacttagtctttaaacaaatcatggaccgccaattagggcagctagattacgatcacaacgctgaattgcaatatggtgcgacttattatcctgacgatcaaccaactcagccaactgaattacttttatacgaaacaaaaccgactgatgaagaatcaacgggcaagcttgataaagctgaaggtcagattgcatcagttgcacagcgaattaaacgaatgattgataatcaagaaaccatctgggatcgggatacgcaagaaatccggccaattcgctatcaagatattgtcttattgacgccaacgcgcaacaacaacctaatcattcttgattatttccaacggttcggcttaccgattgtcattagtgatgcgcagaattatttccaaacaacggaaattcaaatcatgctatctttcttgaaaattattgataatcccaatcaagatattccactggttagcgtgcttcggtcaccaattgtcggtatgaacgaaaatgaactcgcattaatccggattaatgataaaacggatgactattaccaagccgtttttaattatcttgatcagttcgaagcacaaaaatccggccaactcggccaacaagtcttcgaaaaattaacgcatttccaaaccttattaaatgagttacgagccattgcacgtcaacggccactcgttgatttaatctggacaatttaccaaaagaccggctttttagattacgccggtgggatgccagcaggtcgccaacgccaagcaaacttgcacgcactctatgaacgcgctgcgacttacgaagcaaacggctttaaagggctcttccagttcatccaatttatcgaacgtttgcaaaaacaagataaggatttagcccaaccaaccagtctcgccaatcaagatgccatctctgtgatgacgattcatgggagtaaaggcttagaattcccggtggtctttctaatggatgccaatcatcaatttaacgagcaagacttgcgccaaaattacgtgctcgatgatcaatcgggactcggaattgtttacttagacgcgaaaaaacggttaaagattccaacactaccagaattaaccatcacgacccaaaaacggcaaaagttacgcgctgaagaaatgcgaaaactctatgttgctttaacgcgtgccgagcaacggctgattatcgcgggcagttgtgataaccaagcgaaactatttgcaacttggcaaaaaggacagcaaaatcctgatctgcggttggacgcttctgttcgtcaagctagcacgaacttactagattggattggattgagcttaattcgtcatccgcaagcccgtgattggaccgaagaggggacaccattcctacctctgagcgatgacgcaactgaatttaatttaacgtttacaagtgaaacgcgccttggcgaattaccaggtgctttacaccatgatcaagattggagccagcaacaacaagtggcactcaaggcggtcgatttaacaactgatttagccaacgggattcaagaccagctaacattcagttatccagcaaaaggcgccaccgaaacgacagcttaccagtctgtttcagaagtgaaacggctctttgaagatcccgacaatgatcagttggggcaattacgctttgacgctgatacaccgcaacaaacccatcgttacgtgaccgatgaactacctcaaccacaattcatgcagactgttcgaaaagcgagtccggctgaaattggaacggcgacgcatctggtcttacaagaaatcgatttaacccaaccagtaacgatcgatcgggtgcaaagtgtcatcgaccgacttgttttacaaaaaagcctcactgccaatgttgcacaacaaattaaagttgctgctatcatgacattcttcgagagcgagttgggtcagcaactgttagctgaaccagcgcaagttcatcgggaagtcccattttcactattgttaccggctgcatccttattcgccggtttacgcccagaagatcaagacaatgtcttaatccatgggattatggatggttatgtaaccacggataccgactgtattttgttcgactataagactgattttgtgaacctagctgatccagaagctgccattgaggcgattaaagcgcggtataccggccaaattaacctatacagtgccgcgttgacgcaaattgctaaccggccggtaaccgctaaatatctctatctattgtcgattggccaactagtcgctattaactagactggtttctacgcgtcattcatagtatgattgatataataatgagtaaagtattggtgacagcatgaaccaagagacaatttatgccgtcgttgatttagaaacgactggcacaaacattaaagaaggggaccgcattattcaattcggatgcgccctcattcaaaacggcaaaatcattcagacgatttcgcaagatgttaatccgcttcgcgacgtaccgactaaaattcaacatttgacgcatatcactgctgatcaactcgaattagcaccgattttcgaagatttagcgccaacgttagttgaactcttatccggtactgttttcgtggcccataatattaactttgacttaccttttttaaatggcgaattagaacgcgtggggcaaccgccacttgatttgccgggcatcgatactgttgaactggctcagatcgtattgccggaagcaccgagctatcgattacaagacctcacacagttactcgccatcgaacatgacaatcctcatcaagctgacagcgatgccttggtaacggctaaattattcttaaaattaatggcacggctgaagaccctgccattagttaccctagaacgtcttagtgcgttaggcgcgggcttgttacgtcaaacaggggatttcttcacagcgattgccgagcagatgcatgcgcaatcgagaccgctgccgaacgatctcttaattcgtgaaaacattgccctacgaaaaccagccgaggaatcatttaaaatctatccgggatctaattttgcggctgattatccagtggaagaagctgataaaaaacgattattaaaaccccacttgaaatggcgtaaagcgcaagctgccatgatggatatgattcacgataatttcgaatctgaggcacctgaaccactattaattgaagcagccaccgggttagggaagaccatcgggtatttactcccctatagttatcgtatgacgcctgaacacaaattagtggttgcaacatcgacaacgctgctacaggatcagattttaacgcaggccagaccgcttcttgaaaaattagtaggtcgccaaattaatgccgaaatcgttaagagtccgcgtcactatttggatttgcatcgctttgaattatcgctccgtttaccacataagaatcggatggtgcggttgcttcagatgaaaatcttagtttggctaacccaaacaacaacgggggatttggatgaactcaatttaacgagttaccaaacaccatttttcaataacgtgcaacaccggggactaacaagtctgcaaccacaagcgccgttttatcaagatgatttcttacgccgcctgcataagcgccagcaacaagccgaattactcgtcaccaaccacgcctacctggcagagcacgcgaatgatcaccaaacctggggtgcgcgaccatacttggtcttagatgaagcacaaaatatgattttcaatgttcaaaaaattgcgcaacaagattggtcactttcacgttggcaactttggtctcaaaaagggttgcaatatacggatccggaacaggccaataataatttagcccggcttttcccgaaaaaatcaccgcaagcccgctcgttacggttagtgcataaaaacttaaccaagttaggccgaaccatcagtgacttagagacatacctaaccacagcgtttgaactaccgcaaccagaagcgcatcaagcgtttagtgaacgttatttgaatccagatgaagtggttcaatttgtcaccgcttgtcataatcaattcgaccaactgaaccgccaactgttgaccattcaagatcattttctcgcgttgcgttactggcttgaacagcggttagaacaatatacagagggggatttggggatttggcagtcatttgaaaacgaaatcaacctattgttggcggatgttgaagcctatcaacggtttgagcaattattcattgcgacgaaaccgcaggaacaacacgcgttaatgattcagatgacacagcctaaacaacctagtcagttaccacagtttaagctccagtggcaattgctttcagctggtccgcaaatgcaacagatcctcgcgcactttgaaccagtcaccttgactggcgcaacccttgcggttaatgggcacttcgattatttgaaacgtgaacttggttttaccgaagcgcaaccactagcgactaagaaattacgcagtccattccgcttcaagcaacaggcgcgcttttttatcgctgaagatggtcctagtcaaaagaatttagcccccaatgagtaccatcatgcagttgctgaacagctattaacgttattagttggcaatccgcatcaggcgttagtcctctttaattctaatcaggcgttagaacaagtgtattatgcgcttggccgcgccggtttatcgcttgatcgtgagattcttgcccaagggattacgggtagtgcggagaaaattaccaagcgctttatgctggggcacgattcaatcttgttggcgacaagcagtttcattgctggtgttgattttccggaatcagcactggaattagtggtgcttgttcaattaccatttgatgcgccgaatgcactgcagacacgaattcgttacgctcaactttctgcccaaggaattaatccatttaaagcagaggctttacccaaagcaacgattaaactacgccaagcatttgggcgcttaatcagaacccctaacgatcgcggcgtcttcatttgtttagatccccggttattatcgacccaatatgggcaacaaatgcgccgcgcgttaccgacaagtttgccccaaaaagcagcgtcggttaaaataatccggaaattaaccgacttgttttggttaaattcccactaagattcggttttaagcgccgatagccgttattttttgctataataaggcttattcaagcgaacaaggagagaatgcagcgtgcgcaaatataagagatggctctggatattcttattgttggtaatcattggcagcatgctgatgatttatcatcaagctcgaaaacccgaagcaacggctgaaaccaaagccgttaacattgctaaaaaatacgcgaaattaaaagagcctgatgggttctacacgtatcatcgaaatgcaacatattataccgttagtggtaaagaccgtgataatcacggcatcttcgttttaatcaacgaaaaaggcaatcatgccactgtctatcgtcaaagtggtggtatttctaaaaacgatgcgttagaaaagacatggtcaactaaaaatccgcaaaaagtactgaacattaacttcggtatgtaccgcaacaagcctgtttgggaagttgtctataaaagtgacaaaggccgtctttgttatttaaccctcgattttaaaaccgggaagacgattcaattgattgaaaatatctagggttctcaattagggggctgtggttgtcagggttttgttatataataataactatcagttattttgaactgttgtaaattaaatgttgcacataaggagacagagtttatggttaaaaaaatcagtattatcgatgcaaaaaaccatgtcgatgaagaagttaaaattggcgtttggttaaccgacaaacgctcaagtgggaagatttcattcctccaattacgtgatggcactgcctttttccaaggggttgtcgttaaaagccaagtaagcgaagccgttttccaattggcaaaagatgtcaaacaagaatcaagtatgtgggtgacaggggtcattcatgaagatactcgttcacactttggttatgaaattgaaatttctgacatcgaattaattggtgacagcagcgaatacccaattacacctaaagaacatgggattgaattcttattagatcaccgtcacttatggttacgttcaaaacgcccatttgcgatcatgaaaatcagaaatgaaatcatccgcgcttcttatgaattctttaaccaagaaggcttcatcaagatggatccaccaatcttgacgggtagtgcccctgaagggacaactgaattattccacatcgaatatttcgacaacgatgcttatttaacacaaagtggtcagttatacgctgaagctggcgcaatggcctttggtaaagtcttcacttttggccctgttttccgtgctgaaaaatccaaaactcgtcgtcatttgactgagttctggatgattgaaccagaaatggccttcacaactcaagatgaaagtcttgaagtccaagaaaaatacgtggcttaccttgttcaaaacgtcattgatcactgtgcctatgaattaaaattattggaccgtgatgttgaccaattgaagaaatatactaaaacaccgtatccacgtatttcatacgataaggctgttgaaatgttacaagcagctgacttcgatattaaatggggcgatgattttggcgcaccagatgaaacttatttatcggatcaatttgaacaaccagtcttcattttgaattatccaaaagccatcaaacctttctatatgaagccacatccaacacgtgatgatgtttacttatgtgctgatttattggcaccagaaggttatggtgaaattatcggtggtagtgaacgtgaaactgactttgataaattagaagctgaaattaaagcaatgggcttagaccttgaagaatatcaatggtacttagacttacgtcgttacggatcagtgccacattctggtttcggattaggtctagaacgggccattacatggatctgtggtatcgatcatttacgtgaaacaattccattcccaagaatgattaacagaatcaaaccataaagagtactgactcgaacgagttgactttgaggattaacagcaaaacgggcattatggcgcttcacatccatggtgcccgttttacagttaaccggaaaaggcagttcgaagaagcacgtttcaaatagagtgcgttgtagctggttaggttctgagcattaacgttggttggcgaataatcgatgcaatcgattatttgacaatcattgttaagcgcaggaacctagctacaaaagcacgtttgaattagagtgcgttgaaagtggttagttctcgagcatttgtctagtctagtgaatgagcgacgcaagtcgatcgtttgctggacgtagcaaagcaccgaggactactttcaaaagcatgtttcaaatcagagtgctgactcaaacgagttggctttgaggattaactaaagcgccgtgaaccgaaatcaggttctcggcgcttttttatttgtctaaaattggttacaatagaactaatgaaacttttagaaaagaaggctagaatatgaacgaacttaccgcgtttttacaaggcggccaattgagtgtctctcgactgttactgcatcactatcaaacgctcaagatgtcttctgaagaattagtggtttacttacagctcagtgattttgccagtcaaaacaatgactttcccgatttagctgtgattggtgaacgcatgggaattgaatccagccaaatttacgcattgattcatcaacttttacagaaaaaactaattacccttaaatcatctgtcaatgaacaaggtcaggctgaagaccattacgatctcacaccagccttaactaaattgagcgtgctagccgttcaagacgcacaagtcactcaacaagcactagacggtaaccaacggagtgcggtctttaaccaagttgaacaagctcttggccgcccattatcgccattggaatctgagattgttgccaactggttagatttagatcattatcaaccagaattgattcaattagccgtgcgagaagccgttttaaatcaagtctattccttgaagtatgttgataagattttgctcaactggcagaaacaaaatattactgataaagaatccctacaagcttaccaaaaggcccatccaagacgttaatcgaataggagatgaagcggatgttatcaaaagccaaaacacagtgggccatgcaccaactatacaaattaattccagatgcgcagggcgcattagttgctgattcaccgtttcaattgttgattgcggtgatgcttagcgcacaagccaccgacgtttccgtcaataaggtcaccccacaactatttgctgatttcccgacaccagctagtttcgcgaatgcagagattgccgatattgaagctgatattcattcaatcgggttatatcataataaagctaaacacattaaaacatgctgccagcaactaatggcagattttggtggggaagtgccgcgcacacatgccgaattggaacaacttgctggtgttggccgtaagaccgcgaatgtcgttttaggtgacgcctttaacgtcccatcatttgccgtcgatacgcatgtcactcggattgccaaacggctcaaaatcagtgcacaggatgcctcggtgatccagattgaaaaggactttcaagcgaagcttcctaagaaaacatgggttcaagcgcaccacacactcattctttttgggcggcgagtctgtacggcacgtaagccgcattgcgatgagtgtcccttattaaggatttgccaagcaggccaacaatttcttgaagatcgtggttaaaaaacgcaaaaaaagcaccgttcagccaacgtttatcgttgaactgaacggtgcttcttttagttagttggcgctgctggtgtttgtgtcgtcgaccccgttcctggattagttgttgccggaggggttgaggtcgaaggttgcgattgtgaactttcagttggggtgcttgaagatgaggtctccggcacactggaagattcacttggtgtttcaaccacgctacttgagctagaaatttcactgcttgagctgaccggtgcttctgagctagagtagagtacactacttgaagaagatcgactgcttgaagaacttggaatggtcgtcgtccctttaatatagagttctcgtacgccagccacgtttttagcaaccacgttacttggcattgaccaatctgagttggttgcgttttgagcgaggtaggccatcattgctttatagatataagcggcgacgttccgctcacccattgttaatccatttttaagtggttcatcgtatccagtccaaaccgtcactgaatagttcttggtataaccggcaaaccagctatccttcgctaaagttgggtttaacccagatttggcaatttcttcgctagaataatcggttgtcccagtcttaccagcttgatgaagccctggaatttgggctaacgtcccagaaccatttttaataacatcttttaacatatcagtaatcatgtaggccgttgaactcttcatagcctgtgtgccatcagaatcataattatgcgtaatcccatcggctgtttcgactttatggatataagttggtgcatagtaagttccaccgtttgcgaaggcgccatatgcggcagcttcatcaacagttgaaacattcccaccaatcccataagaaagaccagtatcagctggcacgttaatgcctaagcctttcacgaattcacgggctttagtcatgccaacagcttctaacagttcgatggctgggacgtttcgtgagttggcaagcgcattacgcgcggtaattgtaccgagataacggccatcaaagttatgcaattgaatattggttccaggataagtgtaagggacatcttgtagtttctgtgcggttgagtagtcaagatattcgatagctggaccgtaatccattaatggtttcattgatgacccattacttcggccagattgcacggcccggttataaccgagctgcacatcaccagttttacgaccaccaatcatcgcaacaattcgaccgttattaggatctgtaattgaaactgctgtttgtagctgatcatctgggaatggaatactgctatcattattgacgatatcgtataacttacgttgcgcgtccatattgatattggtgtagactttcaaaccagccgtgtacggatcatagccttttttcttcaagtcggcgaggacttccttgacgtaagcgtcggttgctttagaatccgttgaactattcgctactgtttgttgatccactaagccggtattaattgggacttgtttagcttcggcagcttcagttgctgtaatcttattgttccgcaaaagcgcatcaagaactaaatcacggcgcttcttcgctaaatcagggtggaggtacggatcgtaattacttggcgattgcggcatacccgcaatcaatgccagttgtggcaaacttaattccttcaacgacttgccataataatacttagcagccgtccccataccattgaccccgttattcaggtacactttgttcatataatactctaagatttggtcttttgaatattgacgttcgacttgaacggcaagccacgcttcttgtgcttttcgtctgaaagtctgatcgctgtttttcgttgagaatttagacagtttaatcaattgttgggttaaagtactcccaccttgtaagcccagcggtgatttaccagtaatattggcgactgcagcagacgcaattcggattggatcaatcccgaatttttctttatagaaacgacgatcttcaatagagactactgcatcttttaatgtttgcgggatttgatcactcttgacataactccgattttcgccaccaattgttttgaaaggtttcccttgatcatcgtatagaattgtcgcattcggactttgcaggtccgcttgcgttaggtttggtgtatctttaacatagtaggcaaacaaaccaatcccagccacgaaagccactacaatcagtagtaacagccattttagaattcttaaaaagaggggccggcgtttcttattagcgggttttgcttcagctttgtgccttgcaactcgcgaattattattgtttcgattatcggacattgttctttaaactcctttatttgaccgctttaataactgatctacggcatctaagtagggaataattggattaagttggtacttaatctcaatcccattgtcaatcacatcactgagtgaaatcgattttcgtgcaccatcaacttgcgcgtcccagcggctaatcagttctgttgcgggatacaagaatagccgttgtagcgggacaaatttcataatgacaaagcagatgccaccttgattcaagcaggctctgaaatgttcaatctgatgttgatggaagttccgaaacggaaacgcggttttattcttcgtttccttcgcttcaaaatcgacgtaacggccctgataaatcccattatagtcagttgttgaggcttgtttaaaataagcttctttaataaccgcttggctgcgggcagggtagtcgaccttcacaatctgaattggcgttggtttcttatacacgacagccgttgcatgtaatcgataatactgattactatcattgagttcttcttccaacgtcatgccgcgtttaccaaataacgttgttgcttctggttgccgggcttgctttttagttggttttgtctcattatttgtataaggctgtccgttaggataatgaaaggccattgaaaatcacactcctgtttcactattatagcaatgtttagtttaattgaaaatcatttgggagggacctgacttgaaacgactatgggtgagcggctatcgaagctatgaactcggtgtttttggcgaaactgacgagaaacttaaagtaattaaatattccttaaaaaagcagttaacacaatatttagatgatgggctcgagtgggtgatcactggtggccaaatggggattgaacagtggagtctgcaagttgctattgaactaaaaacggactatccggatttaaaattggcgatgatgttgccgtttaatgattttggtcaacaatggaacgaaaataaccaagctcaattgagtcagctcaaagcgcgagtcgatttttgcgaaccagtgattaacgcaccgtattctggaccgcaacaattgcgccagtatcaacaattcatgctgacccatacggatggtcaactattatactatgatcgtgaatcaccgggcaaaccagaatatgattatcatgcagcccgccaatatcaagaccaacaagattatccgattaacttggtcgattttttcgaactacaagatatcgcgactgagttagcggaattagatcagcaagagttttaattatccgataactttgctataatgggaatcatagtacatttattctaaatgaggtgtcaaaatggacaatcaaattgaaatcgaattgaacccaactgatatattgaaaaaagaatttaaaacaaaaatgcggggctatgaacctgaagaagtcgatggttaccttgatttagttattaaagactatcaaacttatcaagaagcaatcgatcggctaacggcggaaaatgcccgcttattcaagaaggttgacgaattaaaccgccaactcagcgcttctgataacgtgaaggaaagtgcaccacaacaatcttcagtagcaaccaactatgatattttgaaacgcttatcaaaccttgaacgccacgtgttcggtgctaagttaagtgaacaaaatcaagcgccacagacaagagttcaaaatcattcacaatttgacgagacaaatctttaatcatgtgctatacttataaacgttgattcaacatttgtaaatcttgagtaatcgcggtctacatcggtaggctgaggaaggtccatgcccgcacaggctgagatgcttgtagtgttcgtgcctggcccaataagccagggtaccttaacggtaacggcggaaaaagcgctaaaacttcggtcatgcgtgaatatccttaaatagtgccacagtgacggagcgtccttggaaacttggacggtggaacgaggtaaaccccgcgagcgagtaacccaaactttggtaggggcgtctcatttatggaaatgaactaaaaatgagagttcgtaagaacagatagatgattactgaaggaactttcttcctggggaagttctggaacaaaacatggcctataaaggtttacaatcaggtggcttgggcttttgcccaagctctttttatttaaaaaataatttcctaaggggatctttaaaaacatgacttaccaactatacgcaacaatggcgagtgggattgaatccattacggccaaagaattacaaaatctcggttatgaaacacgttcagataatggccgagtgtatttcgaaggcgatgtggcagatattgcaaaaaccaatctctggttacgcagtgctgatcgggtgaaaatcgcgattggtcaatttgaggccaaaaccttcgatgacctttttgaacaagtgaaagctttgccatgggacaagttcctgccattagacgccgcttttccagttgctggtcgctcagtccgttcaacgctccatagcgaaccagacgtgcaagccatcactaaaaaagcgattgttgataagttaagtactgtctatcaccgccgaacacgtttagctgaaacaggcgcaacgtatccgcttgaagtcagcatcctaaaagatgtcgtgacgatcagcttagatacaactggtcctagtttattcaagcggggctaccgccttgaaaaaggggaagccccattgaaggaaaacttcgcggcatccttaattcttttaagccgttggcaacctgatatgccatttgttgatccaacgactggttctgggaccattgcgatcgaagcagctttaattggtcacaacattgcacctggtatgcatcgtaagtttgcctttgaagacttcgattggatcgatgcttctgttttagaaaatgccaaagccgaagcgaaagcagccgaaaaagaccaaccacttgaaatttttggttatgatatcgatcaaaacatgattgatatcgctaagttgaatgcaaacgaagctggtgttttacatgatatccagttcaaacaactcgctgttaaagatttcaagacagatttaaccaacggggtcatcatcgccaaccctccttacgggaaacgattaagcgaccaaacacaagcccgtgctttgtataaagaaatgggtgatacctatcggtcattgaagacttggagtaagtatattttaacaagtgacttacaattccaagaatcattcgggcaacgcgcaactaaacgccggaaattgtataatggtcggattcaaactgatttattccaatactggggtcgtccagtatggccacgtgcagaaaaagaataaaattttttataaagcattgccgttttcagtcggtaatgcttttttatttgctgaaaatcccttataataaagattacttcaataataaggtgagggatcgacttgacagtcattttagcagcagaaacaattcctgaacaacacgtcaaagcactaactgcaaaagatttaacaatcatcgctttagctgatttaaaaccaagtcaactgggtagtattgagattatgtttggttggaataaagatgtaggcccgaaaattttagcagagcccggtaatcaattaaaatggattcagaccgcaagctcaggggttgattatttaccactagccacgttagctaagcaaggggtactggtatcaaacgcacgcgggatgcacgcaaaaccaatcgcacagacggcattaagttacatattacactttacccgtgggatttatcagagcttacccgcacaagcagcgcatcaatgggagcatcatgctattggtgaacaaatgacaaatttggaacaccgcacactcctcatttttggaacaggtcaaattggtgaggaaattgcaaagtatgcccacgtcatggggatgcacacaatcggcgttaatcggcacgggaaacccgttgccaattttgatcagattctaaccgacacggattacgaacaagcattgccacaagcagacttcgtgattaatgtgatgccattaacactggtcaccaatcggttcttcgacaccaccttttttacgcaactccatcgaggggcttacttcttcaatttagggcgcggcgcttcagtcgacgaagcagctttgatgcactatctacaatccggtcatttggcaggagcagcaatcgatgttgcccaaaacgaaccattaccaagtgattcaccattatgggccacaccaaacctgattatcacgccacatatttcaggttacatcgctgatatccatgaacggctcttcaaaattttcgatcaaaatttacccagttatttagacaaaggtgaattacccgtcaatccggtagacttgtcagccggctattaaaaaaacagcgttaggactttttgtcttaacgctgttttttttgtgactttaaggggcctttttgaattcgcattttaagcaagtttcgcgaccacttgtccactcactaatctgaaacgtccttaaaatgcgcctctggtgattgatcgtttataaacgtgattagaccgtgatttagccatcaatagcctttaatgtgtttgagcgcattcttttggtagaaagaatgcgctcggaatccctttaaatcaacgataatcaaaggtgcaaaataccaccgcatggtttataatgatatagagaaaaagaatgcggtcaaaaaggcggaaaaaacatgcggaaatcgcgcactaaaaaaggcaaaaaattaaatgttcaacctttacggacaaaagatgagattgaagacatgaaagtcatcttgcgccattcacaaatgggtagtcgcaattatttattatttttactcggcattaatactggcttacgctgttctgatattgtgcagttaaaagtcagagatgtgatcgaagacaatcccgtgattgttgaacaaaaaacgggtaagtggcgccaaattagtttggcgagtttacgcccatacatcagtccctatattcaaaataatgaattgctaggcaatgattggttgtttcctagccgcgtcggcgataaccacatcaccgtcaacggtgtttaccgcatgttgactgaagcaggtaagaaacttgggcgtaatgatattggtacccatacgatgcgcaaaacttacggctactggttctacaaacaattcggggacgtgcggtcattgatgattgattttggtcattcaacgcaagaaacgacgctccattatattgggattacccaagatgaagtgttaagcaagaaacaacaactggcgattggactttaaaaaaagcttgcattaaagtgaggtctaaggtgtatagtaaagacaatataataggaagagataggagattatagttatgaaaacagctacttttatgggtcctggtcaaatgaccattaccgaagcaccaaaaccaacgattgaaaagccaaccgatgcggtcgtgcgcattatccgcgcgtgcgtctgtggttctgatttatggtggtatcgtgggatttcaaaacgagaagtaggcggtttcaccggtcacgaagcaattggcatcgttgatgctgttgggactgacgtacaaaatgttagtgtcggtgattttgtgatcgtgccatttacccatggttgtggccactgtgccgcttgtttaaacggttttgatggcgattgtaccaaccgcgagaataatcctggtggctaccaagccgaatatctccgttatcacaatgcaaactggggcctcgttaaagttcctggccaaccaagcgattactctgatgaaatgctgaataatctattgacgctttcagacgtcatggcaaccggctatcacgctgccgtgtccgctgaagtgaaacccggtgacacagtcgttgtcataggtgatggcgccgttggtttatgtggtgtgattggcgccaaattactcggtgcgaaacggattatcgcgatgagtcgtcatgcggaccggcaaaaattagcccttgaattcggcgcaacagacattgttgctgaacgcggtgacgaaggggtcgcaaaagtgatggcgttaaccgataacgctggggccaacgccgtcttagaatgtgtcgggaccgaacaatccgtcaccactgccgtcgccgttgctggcgcaggggctgtcattggtcgtgtcggcattccccaaaaagcagagatgaacaccaatgccttattccggaagaacatcggtttgcgtgggggaattgctgccgtaacgactcatgatcgcgctcgtttattggatgctgttttaaagggtgccattaatcctggtaaagtctttacacaacgctttaccttagatgatattcaagccgcttatgaagcaatggatcaacgcaaagcgattaaatcattattaatcatcgctgaataatataaaaagtgccgcagaacaggatttttcctgattctgcggcatttttttaatgggcaataagacttaatagataaccgccaagacagccgaagatcagactgagcaaactcccaatgagataatattcggcgaagtggtgttcgttggattcaatggctttaaagcgggtcagcgccttaatcgccacaatcacagcaatactcgcaacattgtgcgtgtaaaacaagattaagatggcaaaccgttctaaatgaccaatatgccgacccagttttgcaccatctggcaggcgatccatgtttaaatccagtccttttaaatagaagctaatgaaataatcggcaaataataacgtgctcaaaacaatactggccgccaataataatcggttcacatggttaaacgcccattgctggccgaggaacatgctcacaaggccgatcactattaaatggagtgcttgatcgatggtataactcatcactggtacgcgattgctggttaaatgtagctgtgcttttaaaagtggttggctattttgcttaaatagatcaatgagccaatgactcatcacaatgatgactaatccgattagtaacggttgccaatgtggccaagtaggtggtgccattaaccaaccgccaccccataaaataagcactaacgggacttgtgtcagtgcgtgcttgcataatggccaccatttcacaccgagtttcgttgaacgtttgcattgggccatctgatcagattgaaagacaaagtcgcagccaatatgactaagcaagaaaagcgcaaagaggttcattcgattgcctccttaaaggtcatcagttgcgcgcgcaacgttgccagggtctgttcaatcaagggatactgaatctgattcagtaagcgactgactttactagaggctaatgcacgccctttttgatcactgtagtctagttcataggaagcaacgccgtatttggtccacaacaattccgctaattcatagcgtttcaatgttggttgaagcacgatttcagcaaaagcgtccttgcgcaactgcgtattcaagagttgctcataaattaaataaaagagggcattaatcccatttgcggctggttgatctgccactaattgaaattgaaaggccgtcgtcataaagggataaccttgtgctaattcagcaccttgacgcaacagtttggcttgatctgctgcggcgagggcgttcacaattgctgtcccgttgacccgattgatatcctgatagtcacttggactcggcgtagtcatcgttcctaagccaaccccaaaataaaaagtgggctccgccagccccgcaaaatgtgtctgccagaaagtttgaaaagcgtcactctttaaataggcattacaaaagggatagacatcaacaatctgtgcctggtcatccgctgaaaaaccgcccaatagaccatcaccatccttaattgcaaatggtgttaataacgctggaaaatggtgattcaacgtgtcggcgaagtgttgcaataactggagtgtctgtgcttgttccgtaaaacgggtgcggctatccgctaaatcaatgaaacaataggctgtctgcatcgttctcatcctctctgaaaacatttgattataagtacataataggtgaatatgaacgaataatcaaatgtttttgaggagcggtttacatttcgcagcctacgtattatagttaactacataagtaactaaccaattaacgaaacggaggtgttccggatgctttttgaatttaataatgatgcaccactctaccggcagattgccgaacaaattgaagagggtatttttactggggtctttccacctggtagtcaagtcccatcgacaactgaaatttccagacaattcaatatcaatccagccacggtactcaaagggatgaatcaactcgttaccagcggcttaatcgaaaagaaaaggggactcggcatgttcgtcacatcaagcgcacccgcacagatcactgaaaaacggcaatctgaattttttgaacactatgttgcccaatttatcactgaagcacaacaattaaacctaaccaaagacgacctaattgcactgattgaaaggggttatgaccatgcctaatttacaaaccacacaactgattaaacaatttgggaaacaggtcgtcctcgacgacatcaacttaacacttaaacccaatacaatttacggcttactcggccgcaatggggtgggtaagagtaccttattaagtattctagccaatcatcaaactgcatccctaggtgagattaaatggggcgatacggtcttaaccggtcgcgatcatccgttacaaacaatttacttgatgtcggaaatcaatctctttaataaagatgacaaattgcggaccattattaaaaataccgccttactgcaaggttcatttgatcatgcactcgccaaagaaatgctgactgcatttgatttgaatccaaaaaagaaactcaatcagctttcaactgggtaccgcacgatttttaaaacaattgttgcgctttgtgtgccggcggaatatgttttcctcgatgaaccagtcttaggcttagatgctaactaccgcagcctcttataccgctacattttacaggcctatgaaagtcggccacggacatttgtcgttgcgacccatatcatcgaagaaattgcgaccttagtcgaacacgtcttggtcttgaacgacgctcaattaattgtcgatgatgatttggaaaccgtcctcgccaagagttaccgtgtcagtggcccggaagaacttgttcgcgagtactgtaccgacttaaacgtcttagattcccagcaaatggggaccttatacacggtttatctttatgacgtcttaccagaagaacgggttattccagatcgtctaacgattgaccatatcgatctacaagaaactttcattaaattaacgaacaaaggaagtgaagcacatgtttaatgcaatgatgcggtaccgcctgaccgccatttggaaaacactggcggggggtgccatcggatttttcggcgggatggttgtcgttgctttaattttctcaaagaatttagacttaggtgattttggccttgcaattgtgacaggtttcttattcctgagtcaaatcacattagtcgttcaatcttttacaaccactcgaaaaacttttaattttgccattttgaatgggattccgagaaagattagcttcctaacacaattaatcagtttattcagcagtcaactggtcacctttgcttgtttatatccaatcgcgattcataaccaaatattcgcgggtattaaagctaacctgttagacccccacattatcgtggcattaattctcgtcgtatggacgttcatggcccagggtttagcgatcagtagtttcattactttatttgaacataaagcttgggttttcctatttgcagcatggttaattatctccacgatttatgaacgttatatcacaccaatcattacgcggatgattccggattggaccgattatttcttcgttaatttcgaacaagtgaatgtcgtatcggcgattaaaattgccttcgatcagccaactttctggattagcaccttgaccagtattgttgcaccgcttatcatcgctggcatttgccaacacttcatgcaaactagacgaatcacgtttagattgagaaaaatagcgcgctagtcaattgtctcgcctttgtgcgagactttttacgtggttgcaatttcagccttaattgttatactaataactattctatttccctaggaggttgtctcatgctcttatccccattatttgaatgtgatgtgccaacaatccgctaatttcgtgcattaaacacaaattggaggattcacacatgacaatcactaaacaagcaaacttagaccaagcacaattggtcaccgcaacattctcattcacaaatgctaaaaaagatgccgcgttctgggacacaactttaacgccgttgctcaacgaaatcgaagcgaatttatcgctcgaacaaattcgtgagttgcccaacatcatcgcgacgaaaaaaacgtataaggcaatcggacttgatgcaacacggcaccgaccatcttcggatagcttattacggcgcgttgttaaaggacaggggctctatcaaattaatgcactggttgatgtgaataactatctatccctgaagttacaattaccgattggcagttacgacttagctaaaatcgacggcccaatcagttatcaagtcgctgcagaaggggacgagtacgccggaattggtaaaggggcgatcaacatcagtcacttcccaattttagtcgatcaacagggggcgtttggcagtccaatttcggattccacacgcgcaatgattgcccctgaaacgacagaagcgatgctcgttgtttatgctttcggacaatcatcagctcaattagtggtaattgaacaaacggttaaaacagtgcttcaaacagcttttaacccagaaacaatcacaactgaaatcatcgcataaaatcaaaaaggagctgagacaaaagtaaattttgtctcagctcctttttgatagccgaacttttatagtccaaacgtgttctgtaactcatatccttgcggttaaccctcaggggatcaccgcgttccgtcacacactcttttttattgtgctaataattcaactaattctgtttttggaatccctgtgaagtaggacgtggtgtcgattggttcgagagtgcttgctaaatgttcacggtcataaaccgtcccgactaatttttcagccaattgattagcatcaccggaaccaaagaagtcgccgtagaacttgacgttggcaatcttcccattttcgattaacaagcgcgcatcaatcgtcccgaaatcgaagtgtttgcgtttttgaaccgttgatttaggtgacttgccatagacccagtcccaattgctatagagatcgttaaaaatcttatcgatggcttgttcgtctgcggccgttaattgatattcgcggtcggcaatatcagctagttgatcggcgtgcatcaagttcagtaataagacgtctctgaactcttctgtcgacatgttttggtattcagggtcaacgtgcccttttaggtttgtgacgcgttgtcgaatcgatttaatgccttttgacgcaatcttatctgcagggacattcaaggcttgggtcaaaacatctaaatcaacatcccatgaaagggtgccgtgggagaaggttttaccattcttggtgtacatcgcgttccctgagaattttttaccgtccactaacatatcattgcgaccagaaacttcagccgttgtggcgcccatttgatggagtgcatcgacgattggttgcgtgaaggatttgaaatcaccgaattgttcagaatctgcgttcaccacgaaactgaaacaaaggttaccgagatcttgataaatcccaccgccaccagacaaccggcgtgtgaccgcaatatcatggtcttccacgtatttttgattgatttcttcatacgtattttggttgcggcccacgataatgcatggtttctcaatgtagaatagtaagagtggttcatcgaaatttttttgattcattaaatattgttcggttgccaagtttcggcgaatatcatttgacttcatcacaacgtaatacatcagcataaaacccctttcataatcactacggatttattatactacatatcgcatcaaccagtgtactgaagcattaaaaaagcggtccccgataaaagggggccgcaggattaatcatcgctatattccaaaatatcaccaggttggcagtctaatacgcgacataacttctcgagcgtcgaaaagcgaattgctttggctttaccggtttttaaattcgaaaggttcgcaatcgtaatatcgacctgttcagcaagcgccgtgacactcattttccgttgagcgagaattacgtctaaattcacacgaatggccattgaattcctccttagaccgttaaatcgacttcagattgaaaggcgattgcacttttaaaaagatcttcaacaatctgcatcaaaatgaggattgcaaacggaatgaagaccaggcctaaccccagcaacatcaagcctggtgcatcttcgagttgcgtaatccggtagaaaaaggggagggcaaaaagggccgtcaaactcgcaaccaaaatcgcttttctaattgctgatacatatcgtagcgtctgagggagaaaaacttgatggtgctcaattaagcggagaatctgcgccaacttgattaatgcaaaccaaatactcgccgtcacaccatacgcagcaatcgccaacatccagattgtcgctgggtattctaagtgtttcgtggtcacaatttggatcgtcactaacaaacttaacagaccaaataccgccgcaattccgagtaatgccattctaagtagccatttttttaacattcatctgatacctcgtttttaagaatagttttattataatcgttttttattgaaaaacaattaatttttatcgtttttcgataaaacttaatatttaagactagtcaaagtaggcgtaactgttataattatcggggtaaaacctttttcgtcattgcgcatcaaccgaatgaacaactgaatacgaaaaataagctcaaaacgtttttgagtcaaacaactacgcaaacactagcgcacaattcctatcaaaaactggacgaagacggcttcatttttattgccgataatcagtttaaaccacaccaagactttggctatgggatggtcacagtaggcattccgcgcgacttcacactgcaagccattgttgcgacggccaatctaaacgacccactctacaatcgctatccaatttatcaaattcaatgatcagggagaaaacaatcactatgaaaaaaataatgcctgtcttcattttattactatctatcacaatgttttttatgactggttgcaatcgttccattgaaacacacacaccacccaaaacacagactaaaaaaagggactagtttacctaaacacggaacaatcagattaacaactgcgactcatttttgaatcgcatgccacatttgcgtctgggctcttggatccagatcagtggtaggttcatcgagaaagaggatccttggcttgccaactaagctgaccgctaagtccaaccgtcgccgcatcccacctgaaaaagtcgccaatgtttgatccgctgattggtccaaatcaaagtccgtcagtaactcgttagctcgggttcgactcgctttggcactgagcccatttaaccgcccaaataagcggagattctcgcgcgcacttaagtcttgatcgattgccgctgtttgattggtgacactaaactgttggcgcacttggcggctttgtgttatcgtatcaaagccattaatgtgattgtgccactatctggtcgtaggagggtggtcatcatttttaagagcgttgttttcccggcaccattgggcactaataatgcgaaaatctcacctttagaaacggctagcgaaacgaaacgcaccacttttttggtcccaaatgctttttgaatattgtttacttcaatgacatgctcactgcacataatattgcctcctcatttaataatcaggtcacatgattaatttatatagtaaggtcacctgattaaaatgtcaaggattgctactcttagattttggaatggtgtatactaattaaaacagcgaagggaagatgacgtatggcaaagagtgtcaaggccgaattggtcgccggaaaattagctgaatatgaacaactcagtaagatctacgatgatatcgttaaacaagcacgcccgcatttaatcgtcgaaggccaggggaagattctattggcacttgctgatgaagatcacttatcgcaacgtgaactagcaacgcgtttgggaatgtcacctcaatcaaccagtgaatttgtcgctaaactcgctaaacgcgagctggtgacgttaagtaagctcccaagtgatcgccgggttaatttagttaacttaacggatgccggtcgccaagaaattgaaactgccaatcaagaggtgccaccgtttgtgaacgccttgaccgaggcagaactcgaccagttagtgccactactcaacaagattacaacggcgatgtatgccgatattgatgcctcaaatccgacgttgggcgttaagtttcataaattattggccggacgatatctgaaacaatttaaaaaataaccaaaaaaatagcgcgtctcacttaaattagtggggcgcgctattgcatttaattaatcaaagtcgtaatcactatcttccatcgcttccacattccctaagcgataaccattcccaacttgggagaagaaatcgtggttggcagttgaagtcgacatcccattcaagatcacggggttcacatcttcagcactatctgggaagagggcgccttgaccgaggttcattaaggctttgttggcgttataacggaggtaagttaatacttcttctgtccaaccagtgccatcataaacttcgtgggtgtatttttcttcgttggcatataagtcgtacagtaaatcatacatccagttttgtaattcttcttgttctgacttatccaattcattgaaggctaattggaacttatagccgatgtaagtcccatggactgattcatcacggataatcaatttaatgatttcagcaacgttggccaacttattgttccctaagtaatagagtggggtatagaaaccagaataaaagaggaaggtttctaaaaagacgctggcaattttttgttgcaagggtgtgccgttttgatagatatcgttaatcttgttggctttgtattgcaagaattcatttgtgttggtccagtcgaagatttcatcaatttcagttggtgtgtttaacgttgaaaaaatggatgaataactcttcgcatgcacggattccatgaattgaatgttgtttaaaacggcttcttcatgttgggtgcggatattggcttttaagctggccatcccatcttgtgattgcagcgtatcaagtagggttaagccgccaaagacgtgcccgacgatccatttttcgttgtctggtaaactgcgccagtcatctaagtcattggaaaggggaatccgcgtatctaaccaaaattgttcggttaatttttcccaagttgctttatcaatttgatcttcaacttggttccagttaattgcaatataattttctgccatgttcatgaactccttttaacgtgcttcttttttaggtatgtaggccagctgacgagcagctggagtggagatttagtgtttgctttgaaacgtgcttttcaagctaactttctgcgcttagcccagtgaatcaaatcatcgactacttcgctaattcgcttccctatgctaatgctcaaaatataaacgcctgccgtcgcactctgttttgaaacgtgctttttgaaactgacttctgcgcttagttacactcgtcaaacaactgcttatagcagttattcgccgagttagactaatgctcaaagtcaaaccgtttcaaacgcactctagattacacaactttcgcatgcgtttgcgccgacttcactttcgtcgtctgtgtaagtccggatgtagtagattgatttaatccctttgtggtgggcgtagtttcttaagatgtttaagtcccgggtggtcattttgtcagtccggccgtttttccattcgtaaaggcctactggaatcgttgaacgcatgaagagcgtcatactcatcccttggtcgacatgtttttgtgctgctgcgtagatgtcgataactttacgcatgtcaatgtcataagctgattcataatatggcatagtgtcgtttgaaagacctggggcagggtagtagattgtcccaattttcttttcttgccgatcttcaatccggttaacaatcggttgtaagctggcagaagtatcgttgatgtatgaaattgaaccgtttggtgcaacggctaagcggttttgatggtataaaccgtcttgcatgatggctagttttaaagcttcccaatcggcttttgtgggaatcatgatgtctttgaagattgccttgactttgtccgtcttaggggcccagtcttcagtgacgtattgatcgaagtaactaccatcagcatacttactcttttcaaagttggcaaaggtcatctgacgttccttagcaatcttatttgaagcaacaagtgtccagtagtttaagagcatgaaataattactggtaaagtcgattgattcttctgacccatacatcatgtggttcttggcaaagaaggtatgcagacccatgccacctaaaccaatggtgtgggccaattcgttcccatgagccacagaagggaccacatcaatatcagaatgatctgtgacgtaggttaaagcacgcaccatggcttcgatagaaccaccaaagtcaggtgacgtcatcatgttcggaatattcgttgaacccaggttacaactgatatccgtccctaacacgtcatattcttggcggttattaatttgtgacggggtttgcacttggaggacttcagaacagaggttactcatgatgatcttcccatcaattgggttcgcagcattggctgtgtccacattgacgatgtaaggataacctgattcttgttgcaatttactaatttcattttctaaatcacgggctttaattttggttttcttgatgttatcgttggcgattaagttgtcatattctttggtgatgtcaacatatgagaaaggtacgccgtattctttttcaacaccgtaagggctgaataaatacatatcagcatcagctttcaccaattcatagaacttgtcggggacgactaagcctaatgagagggtctttaaacgatatttttcgtctgcattttcttttttagcacctaagaaagcaatcacatctggatggaaggcgtttaaataaaccacgccggcgccttgccgttgacctaattggtttgagtatgagaaagaatcctccaataacttcatgacagggaggacaccacttgctgcaccgtcgatgcctttgattggatcgccagctccacggaggttcgacaagctaatcccaaccccgccaccaatccgtgataattcaagtgccgagttaatcgtccgaccaattgaattcatatcatcggttgtttggagtaagaaacatgaaactaattcaccacgccgtgaacgcccagcattcaaaaacgatggtgttgccggttgataacgttggtggatcatttcatccgctagttgcagcgcaagggtttgatcaccatctgcgaagtagagagcattcacaaaaacgcgatctttaaaatcttcaagataaaagccattgtcgtttgtttttaatgcgtattgcgcatagaacttataagcagccataaatgacttgaagtggaagtcttggtcctttaaatattgattcaattcttccatgaatgaaagagaataagccttcaaaaaatctgcttcataataattttccgcgactaaataatctagacggtcttgaagtgatttaaacgtcaccatattgggttgtacgttttgttccaaaaaggcatcgagtgcttcttgatccttttgtaatggaatttgaccattcactggaatattaatttggttattcaattcatagtatgttacatcttcggttttaatctcttttaaagacatccttgccaccactttctagtcatattagctgttttagggtttaaaaaaagtgaagaccaactctttagtaatcaagagtcggcctcacccgttaaaactgggaatgcatggtgcttaaatcgccaatttttgcaattccgctggtctaaaacctgagaagctttctaggccatccgcttctaaaacgggaacggcttggaaaccttgttccttcaagtaatcaatatattgtggttcgtcattgatgttatgttcaacaaaaggaacgttgtgcgtttctaaaaagtgtttcgtcatccggcattgtgggcagccgttcttagtatataatgtgatatttgccataatcgttaactcccttgtatttctcttatcgataaaaatagtataccgttttgaaatggaagatgcaatcaataaacaccacatattgtagataaaacaaaaaacgaccactaattatagtggtcgtttacgaatgttcatttgattgtcttgggcaacgtcctgtacttaagttaaacatatttatgggtaaagtcaatccctgctaatgcgcaaaatttttcaaaagcacgccggacaaagcttaacagattttaaaaaattttttagattggggttaatttaatattgcaccatcataaaaatgagttaacgaacattttataaaattggtgaaagtaaccgtgaaaatttttgtttaaatttcaaccaagttgactgttgggcgattatttcgtctgttagtagggatgctttttccatatcagcctgatagatcgcttcaagttgcgctgcaactttcggatcgtaaataaacgtattggcttcaaagttcagcttgaaactacggatatccatattggcagaacctacagtgctgatatgcccatccatgaccgccgtcttagcatgtaagaatccatcttcataccggtaaatcttaacgccagctgcatgcaagagttgactgtagtattccgttgcacggtagatgaaggggtgatccggcatgttaggcgtcatgatacgaacatccaccccggacattgccgcagtcgtcaacgcatcaataatactatcatccggaactagatagggcgtttgaatccataaacgcttcttagcggtactaatcatcttcagataaccgagtttgatttgttcatctaatttatcgggaccacttgagacaatttgcatggctgctgatccacgattttgggattggtccactgggaagagttcttccgagtaagttaacttaatcgcaggctcaacactcgcgttccagtccatcataaagcgtacttgtaaggctaacacggcattgccggtaatccgcatatgggtatcacgccaatgtccgaatttcctactccggcctagatattgatcgccaacgttaaagccaccaatataaccaatcttaccgtcaattaccacaatcttacggtgatcacggaagttcaagcgaaaatcggtaatcgtgtgttttgaactgaagaacgttcgcgcgtggccaccgacatcttcaagtgcgcgccaccatttttgcgttgcgccttgggagccccaagcatcgtagacaacgttgactgaaacgccttctttggctttttgaatcaatagttgttgtaactcattgcccaatcggtcattatagatcgtataatattcgatatgaatacttttttgagcttgtttgatgtcggcaaagagggcgtcaaactttgcttgcccgtcagtatagattttgacatggttattctttaaaacgggtgcattattaatatttaaaaagagattcaccatttcggatgcttcactggaaagcatctttttcggtaagaggtcgtttttacgattttccttacgttgaatgtcgaccaatgcgaaaagcccatcatcgatttgcgattgactttggaaaatctttttccgcgataagccccgtccggtaaacatatataggataaaaccgcccacgggtagtaaaattaagactagcagccacgcccaggtggccgcaatatcgcggggctgtctcaaaattgtaataattgccaataaggcattaatgaagatgatgaatgacattatttctgtaactaaaaccatatcgtactcctccaaaattctagcgttgcttattattttactaaaatcacgctcaaagcgctagttaagcctatcaacagtcagttaaatgaggtaatccctgttgggccagatggtgcgccccctgattctgacgctctggaatccattggtggatgaccattgaatagggcgcctcaagtgctagaatccggtcgacggcagcttgataatgtttagcataccgcttttctaggctctgaaagacaagcttgctgtcaacgttaatctgtagtattttcgtggtaagcccccgattggctagttgttctaagccaagaatgaccgccgcaaattctgcatcatgattggactgttctggcaaaggtgcttgtagttgatattgtcgctctggtgtcacgattaaaattcccgccgcacttggtccgggattgccacgagttgctgcgtccgtataaagtttaatcattcttaaaatttaccgcctttcactgacagcagggtcaggttaatggtatgatacaaagcgtaaaaaggagtgttctcatgcaaaagacaaccaccgcattctaccaaccaaattatgcttacttcgtgacgatttggtcttggattggcttcgtctatacattagctttaattgtacaacttgaactcatcaacttaaactggcaatcgtggggcatcggcttaattgccgtttggttgacgctatgggtcattttcgggcatcgtgtttcaatgacggcagacgtgatcacgcttaaacggccggtatttaaatataatcgaaccatcaaccgtgaaacgactacgaccattattgtccaaaaacatggtttattaattaaaaccaacgaacttgattaccaacccgaacaaatactccttagtcgcaaagccaagcaggcattcgttgaacaactgaaacaaaatggttggccaattgaagaatagttaaataaaaaagagccacgacaaacattaatcttgtcgtggctcttttttagcgtttaaacgtatttttattctgctatcttttgcacgttagctgcctgcaacccgcgggcgccttctttaatctcaaataataccggctcgtctttattcaatgatttatagccgtcggtttggattgcggtaaaatggacgaaaacctcctcgtcatctccataactgatgaagccataacctttagcattgctaaaccacttaacgattcctcgttccatcacaatccctccttgaaatgttaatcagcgtacgcgcttattttaccacgtacaaagaagtgtgtcgaagaatatcgttctttttaagcatcccatctgccaattccgtacgtaatcagctatactaggtagtatcataaataaaaaggagctgggcggtatgtcagatattcaaatagcacaggaaaatgaagctaaggagatgcagccaatcacggcaattgccgaacaagctggtttaacggccgctgatttagaacaatatggaccgtataaagcgaaggttaatttcgctgccattaatcgattgaaagaaaaagaagatggcaaactcatcttagtgacctcaatcaatcccacaccagctggagaaggtaaatcaaccgtgactgtcggtcttggcgacgctcttcgtcaactagatcaatcagccgtcattgctttacgtgaaccttcactaggccccgtcatggggatgaaaggtggcgcaactggtgggggctatgcccaagtggtaccaatggcagatattaacttacattttacaggggatatgcacgcattgaccgctgctgtgaatactttagccgccctaatcgataaccatctgcaacagggaaatgccctcaacattgatccccgccgaattatttggaaacgggcgcttgatattaatgatcgtgcattacgccaagttgtcattggacttggtggtccagtgcaagggatgccgcgccaagatggttttgacattaccgttgctagcgaattaatggccattctctgcttagcaactgacattactgacttgaagcggcgcattagccaaatcgtcattggttacacttatgatcgacaacccgtcacagttggcgagctcgaaatcaccggtgcaatcgcgatgcttttaaaagatgccctcaaaccaaacctcgtccaaacgcttgaacatacaccagccttaattcacggtggaccatttgccaatatcgcccacggctgtaacagtattttagcaacccaaacggccctaaaaatgggtgatattgcgattactgaagctggcttcggcgctgacttaggtgctgaaaagttcctagacatcaaagtcccacaacttggcaagactcctgataccatcgtgattgttgccactgttcgggcgttaaaatacaacggtggtgttgctttagctgatttaaccactgaaaatctcggtgcgttagacaaagggtttagtaacttagccaaacatattgctaatatgcaacgttacggcattcccgtagtcgttgccatcaatgagtttacaagtgataccgaagcagaggttacaatgctccaagaaaaatgtgctgaactgggtgtcaaagccgttttagctagtgtttgggcacatggtggtaaaggtggccttgatttagcccaggccgtcttagaagcactcgatcaacctaaaaacttccaaccattatatgattcaaacgccgacattcaatcgaaactaaccacaattgtcactgacatctatggcggtaaagaggttgttttcgagggcaaagctatcaaccaactgaaagaaatcgaaaaaaatggctgggaccacttaccagtctgtatcgccaaaacacaatattcactctcagacgatccaaaagcattaggcgcaccaactgatttcaccgttcacgtccgtgaattgattccaaagcttggcgcaggcttcatcgtcgcaatgaccggcacagtcctcaccatgccaggtctaccaaagaaaccagccgccctcaacatggacgtcacagaagatggcctgattagcggattattctagagtgcgtttgaaacggttagcttctgagcattaatagaatttgacgaattgccgatacaatcggcgatttggcaaatttggttaagcgcagaaagttagcttgaaaagcacgttttccaatatcctaacgcccatctcgaaaactgattgacaagtcagccgattttaaggacaatggtagattgtatgaataggaggttcccatgctcatctatatcgttttagccgcagtcattgtactcggtgaccaacttttaaaaagctggattgttgtccatgttgcctttgcagcaacccaacccgttattccgaacgtgctgagtttaacgtatgttcaaaacgatggggctgcgtggagtatcttggccggtcaacagtggtttttctacctcgtcaccattgtggccctcggggtaattggctacttattttatacctctgatcgcactgaaaaattttaccggatcggtttaacgttgctgttagccggaacacttggtaacttcatcgatcggctccaccttaagtacgtcgtagacatgttccaaatcgaatttattaatttccccatctttaacgttgcggatgttgccttaacagtaggcgtcatctgcgtctttattgctattttgttgaaagagaaagtgactcatgactgaaactaaacaattaacgattacaactgaaacaggccggattgataaggcgctcacccaattactacccgattactcacgttcacaaatccagcaatggttgaaaaaagacttggtgcaagtcaatgatcaaccttgtaagagtaaccgcaaagtcgtaacaggggatgtcgtcaccgtcaatattccagaccctgtcacgctcgacttaaccccagaagatattccgctcgatatcgtctatgaagacgatcaagtcctcgtagtcaataaaccacaagggatggtggttcatccatcagctggccacccgaatgggacattggtcaacgctttattggcgcacaccccattgtctgaaatcaacggcgtcttccggccggggattgtccatcgaattgataaagatacctctggtcttttgatggtggctaaaaccaacgaagcccacgaatctttatccgcccaactcaaagctaaggaaaacttacgtgaatatatcgcgctagtccacggcaacatcgaagaagacgaggggaccattgatgcacccattggtcgttcaaaagtcgaccggatgaaacaagcaatcgtcgaagatggccgcccagcggtcacgcattttacggtcatggaacggtttgaagacttcacattaatcaaatgtcgactagaaactgggcgcacccatcaaattcgcgttcacttagcctatattaaccggccagttgctggcgatcccgtttatggtccccgcaaaactttagctgggcatggtcagttcttacatgctgctgtattaggctttaagcacccaacgacgggcgaaatgatgcgctttgaagccccattacccgcaatcttcgagaaaactttaaccgaattacgtgaaaatcattgacaaatcaaggattctccgttaagctaggtctaacttaatagaagcctttaaaatcggtcccgtgaggccgagaaggtacggtgaaagcaccactagacgcggagtctctaactgtaacctctcgaccttatcggtttgagaggttttttgtttggaaggagtctttacgatggtcaaagaagtggtcgacagtaacacaatgaaacgggtctttactcggattacgtacgaaattatcgaacagaataaggggatttcagatctcgtcctcgtcggcattaaaacccgtggcgtgtttattgcccaacggattgcagaacgcctcgaacaattagaaggcatcgcattgcccgtcggtacactagacattacgttataccgcgatgatcaacatgatcttgatacacaaaatgaaccacagattaacgggagcgatattcccgtcgatatcacaaataagcatgtcatcttaatcgacgatgtgctttacacagggcggacgattcgggccgcgcttgacgccttaatggacttaggccggccaaagaaaatttcattggctgtcttagtcgatcgtggtcatcgtgaattaccaattcgccccgattttgtcggtaaaaatattccaaccgccctcaacgaacaaattcgcgttgcgatggaagaaattgatcaacatgatgggattaccatcgaaaaactaactaaataacgactgaaccgtttaattgtctccagagagagcaaaagggtttgtcttgaacttagtgcgcctaaaaaaaggggcctaagtccgtcaagggacacacctaccaatctgttggagcgtgtgtctttttttggttcaaaaagtcggcgacatggaggaaatacttatggctacacaatttagaaatcccgatgcggtcttagacgtcaacgaacgccccagcaccggtaaatggattggtttatccattcaacatatgtttgcaatgtttggctcaaccgttctagtgccaatcttagttggtttaaacccagggattgcgttattcagttccggggtcggcaccttaatgtacctcttgattaccaaaggcaagattccagcatacatggggtcgagtttctcattcatcgtgccaatgctcgctttgatgaaaacgactggctaccctgggattgcacaagggacaatggcggttggggcagtctacttaatcgtttcaatcttagtcagtctgattggttccgactggatcgacaaagccttaccacccattgttgtcggcccaatcgtgatggtgattggcttatcactcgctggcacagctgccaaacaagccactatcaatgcccacgggaattacgacttaaaattcttcgcagtcgctttactaacgttgttaatcaccatcggctttaatatgtatctcaaaggattcatgagcttagtccccatcttgctcggcatcattgctggctacatcatcgccgtcttgttcgggatcgtcgattttcaacccgtgatggacgccccttggtttaaagtaccagacttccaagtcccatttgtcacttacaaacccggtctgtactggggcgcgattctcagcatggcaccaattgcctttgtcacaatgaccgaacacatgggccacattatggtcttaaacaaactcaccaagcgtaacttctttaaagatcctggtcttcaccgcacgttagccggggacgggacagcctcaatcatcgccgcttttgtcggaggaccgcccgtcacaagttatggtgaaaacatcggtgtcctcgccatcaccaaagtccacagtgtctgggtcttaggtggcgccgcattcttcgccatgatcttcggcttcatcggcaaactgagcgcgttgattcaaagcatccccacacccgtaattggtgggattagcttcttactcttcggggtcatcgcctcaagcggtttgcgcgtcttaatcgacaaacaagtcgattttgataagaaacgcaacttaatgattggttcatcaatcctcgtcatcgggattggcaatgcctacttacaattaggccaataccaattctcagggctagccatcgccaccgtccttgggattgtcttaaaccttgttttaccggataaagcaaagagcgaacttgaattggaggctcaacaaaatgcaaaagcataacgcgttggtttccgttgatcaactcaccaatgatttagtcgcaggtctcatcaaccgcgctagcgcctttaaaaagggcgcgacaagcaaattaactcggccggtctacgcaatgaacctattctttgaaaatagcacacggacccatacgagtttcgaaatggcagaacgcaaactcggcatgaccgtcttagacttcaatgccgatacgagttcgacttccaaaggcgagaccctcagcgatacgctcaaaacggtacaagccattggcgtcgatttcgttgctgtccgccattctcagaataattattacgacgccttactcgcagatgatcaattccacatggcactggccaatgcgggcgatgggagtgggcaacacccatcccaatgcttactcgatttaatgacgattcacgaagagttcggccactttgtaggcttaaaagtcgtcatctgtggtgacttgcgtcattcccgggtggcacggtcaaatatgcaactgctcaaacaactcggcgcaacattgtattttgccggccctgaggcatggttcgcccctgaatttgcccaatacggacaaccagcccaactcgatgacgtcttaccagaagttgacgtcgtcatgttactccggattcaacacgaacgctttgctgccgatgaaaccttatctgacactgcattccatactcagtacggtttgacaactgagcgggcagcacaccttaagtccagtgctatctggttgcacccagcacccgtcaatcgtgacgttgaaattgccgacgaactcgttgaagccccacaatcgcgaatttttaaacaaatgaccaacggcgtttttatgcggatggccatcattgaacacctattagaccaacaacatctgattcaacattaagagggggatctgctatgtatcaattgatcaaaaacggccaagtcttgattgacggccaactgcaaaaacgcgacatcgccatcgatgcaaccggtcagattacggcaattgaaccaacgattaccgcagtcccaaccgacccagaaacgatttatgacgcacacggccatttcgtcagtgccggcttaatcgacggacacgtccacttcagagatccaggcttcacgacaaaagaaacactcaaaacagggagcacagcggttgcccacggtggttttactagcgtaattgcaatgccgaacttaaagcccgtacctgataacttgctagatttcaagacactggttgcacgcaatcaggcagaaaccagcgtccacacatatcaatttgcaccgattaccaatgagttaactgaacaaacaattgtcgacatgtcggcgtttaaggcagctggtgcagcaggctttaccaacgatggtcatggggtacaaacggcacaaacaatgtaccaagcgatgcagatggccgcccagattaacatgcccatcgtcgcgcacgtcgaagatgaatcactcgtcaacggcggcgtcattcacgacggtcaagccgctaaaaaactaggcgttcccggaattgcgagtgtcagtgaatccgcccaagtcgcccgggatatcgagctagcacgggcgaccggcgttcattatcatatctgccacatctcaactaaggaaaccgtcaatctcgttcgccgcgcaaaacaagatggcctcaacgtcacttgcgaagtcaccccacatcatttgttactcgatgattcagcgattaccagtgacaacgcaatgctcaaaatgaatccgccactacgaacacttgcagatcgccaagcactctgggcgggcttaatggatgggacgattgatattattgcgaccgatcacgcaccgcataccacagaagagaaacaacagtcgttattgaaagcgccatttggtatagtagggagtgaaacagcctttagcttgttatacacacatttagttgccaacggtccatttagtctcgcgcaactgacaagctggctaacaaccaacccggcccatgttttcaacttaccacacgccggccagttagcggttggccaaccagctgaccttgctgtttttaatttaacggataccaccacaatcgacgcaaacactttcttatcgaaaggccacaacacgccatttatcggcgaagcagtgcaaggtgatactttattaaccttggttgctggtcagattgcatatcaaaaggagtgaactaaaagatgaaacgttaccttattttagaagatggcaccatcttccccggcaccggttttggcgccccaattatctcgacaggcgaaatcgtctttaacaccgggatgagtgggtaccaagaaaccattactgatcaatcatacaacggccaaatcatcgcttttacataccctttaatcggtaattacggggtcaatcgcgacgactttgaatcgattaaaccaacctgtaaaggggttgtcgtccatgaaacaccacgcctagcaaataactggcggatgaatatgagtcttgatgactttttaaagcaaaagaaaattcctgggattgccggcatcgatacgcgggcactcactcgccgtctgcgcgataaagggaccatgaaagccagcatcgttgatgccgcagacgatcacgcgttcgatcaactcaaggcattggtcttaccaaaaaaccaagtccaacaagtctcaacggccaaaccttatccgagtcctgctaacgggcggaacatcgtcgtgattgactttggcttaaaacatagtatccttcgtgaactgtcaaaacgcgactgtaacatcactgtcttaccatacaacacaacagctgaagaaattctgagtctcgatccagacggcgtcatgttaaccaacggccctggtgatccagaagatgtgccagaagccattgaaatgatcaaagggattcaaggtaaagtgccgattttcgggatttgtctcggtcaccaactttttgccctcgccaatggggctaaaacctacaagatgaagttcggccaccgtggtttcaaccatccggtccgagaagttgccaccaaacggatcgacttcacatctcaaaatcatgggtacgccgtggatgccgactccatcgacccacaaaaccttctgattacacacgttgaaattaacgatcaaacagtcgaaggtctccgtcatagacaatatccggccttttccgttcaattccatccagacgcagcccctggtccacacgacgctgcacatctattcgatgaatttatcgacatgatcgatgacttcaatcgccgccaaaaatagtaaaaaggggatttagtgatgccaaaacgtaccgatattcataaaattttagtgattggctctggcccaatcgtaattggtcaagccgccgagtttgattactcaggcactcaagcctgcttagcgcttaaagaagaaggctaccaagtcgttttaattaactcaaatcctgcgacaatcatgactgataaagccgttgctgatacggtttatatcgaaccgatcacgattgactttgtcacgcaaattctacgcaaagaactcccagatgccatcttaccaaccctcggcggccaaaccggcttaaatatggctttggaactggcaaacaacgggattctcgccgagctgaacattgaattgctcggtaccaagctcagcgcgattgatcaagctgaagaccgcgaactgtttaaaaacttgatgaatcagttaaacgaaccgattccagaatctgcgattgcccattcactcgttgaagcccaaacattcgttaacgaaaacgggtatccggtcattatccgtccagcttttacccttggtggcactggtggcgggattgccgaaaatgccggtgaactgagcacaattgtcaaaaacgggcttagcctatctccagtcggacaagtcctcgttgaacaaagtattgccggtttcaaggaaatcgaattcgaagtcatgcgcgacaaaaatgacaacgcgctagtcgtctgcaacatggaaaacttcgacccagtcgggattcatactggcgattccatcgtatttgcacccgttcaaaccttaagtgaccgtgaagtccaagcattgcgcgatgccgcacttaaaatcattcgcgccttgaagattgaagggggctgtaacgttcaactcgcccttgatcctaatagcgaccgctactacattatcgaagtcaatccacgggtgagtcgttcatcagcccttgcttctaaagcaactggctatccaattgcaaaaatggcggctaaaatcgccatcggtttaacacttgatgaaattcataatccaatcaccgggacaacctatgcgcaatttgaaccgatgctcgattacgtcgttgcgaagattccccgttggccatttgataaattcaacaaaggtgatcggcaactcggcacccaaatgaaggccaccggtgaagtgatggccattggacgcaacattgaagaagcattactcaaagccgttcgctcacttgaaattggcactgaccatctcgaaattccagcattgacggcagtcggtgataacgaccttgtccaacggattgtacatccccaagacgaccgacttttctaccttgccgaagcattgcgccgcggttattcaattcaagaacttagtgaattgacaaaaattgatcttttcttcctggataaactcagccacattgttgaaattgaagaacaactccggaccgataaaggtgacttagaattactcgaactcgccaagaaaaatggctttgccgacgctaaaattgccgcaacttggcaaatcatgcctgcccaagtccgccaaatgcgccaagaaagtggcattcagccagtttataagatggtcgatacttgtgcagccgaattcgaatcacaaacaccttattactacgcgacttacgaacaagaaaacgaaagcattgtcagcacaaagccttcaatcttagtgattggttccggtccaattcggattgggcagggggttgaattcgattatgcaaccgtccactgtgtgcaagccatccaaaaggcgggctacgaagcaattatcatgaacagtaatccagaaacagtttcgactgacttttcaatttcagataaattgtacttcgaaccactgacactagaagatgtcctcaacgtcgttgaactcgaaaaaccagaaggggtgattgtgcaattcggggggcaaacagccatcaaccttgccgaaccactgaccgaaaatggtgtgcagattctcgggacaagcgtcgcgaacttaaaccgcgctgaagaccgtgaccaattcgatcaattaatcgccgaactcgacattccacaaccagtcggggcaaccgcaaccaatacgccagatgcgttgaagattgctgaagagattggttatccggtcttaatccgacctagtttcgttttaggcgggcgggcaatggaaatcgttcatactgcagaagaccttacacattacatgaaagaggccgttaaagtttcagtcgaccaaccggtcctaattgaccgctacttaatgggcaaagaatgcgaagtcgatgccatctgtgacggcaaagatgtcttaattccgggaattatggaacatatcgaacgcgctggtgttcattcgggcgattcaatggcggtttatccaccacaaaatctgacggatgcggaaaaacaagccatcatcacttacacgaccaagctctgtttagcacttgaatgtcgcggcttgttaaacatccaattcattatccaaaatgaagcagtctacgtgattgaagtcaatccacgggctagtcggaccgttccattcttgagtaaagtcaccggcatctcgatggcgcaactggccacccaagtcattttaggcagcacactagctgaattaaagagcccaaccggtctattaccagcgggcccactaattcatattaaagcacctgtcttctcattctcgaaactcacgcgggttgatagcttactcgggccagaaatgaaatcgaccggggaagtcatgggaactgacgtaacgatgcaaaaagcactctataaagcgttcgaagctagtgggatgcacttaccaagtcacgggaacgtcttaatgacaattactaaccaagataagacacaagcgctcgaattagcaaaacgcttccgcgaagttggctatcaaatcattgccacgcctgggactagtcaagaattccaagcagcaggtgtgccagtgcaatccgttgccaagattaatgctacgagcggcgatttacttgataaaatcaaagccggccacattcaactggtcatcaacacaaccggcttgaacgaagccccacaagtcgctaaagacagcatcgtcattcgccaaaccgccattgaacacggcattccattgatgacctcattggataccgctgatgcgatcttagcggtcctagaatctcaatcgctcctgaccaaaccactttaaaaccactaaaagagtctgaagccctttgcctaaggctcttttattacataaaaatcagaaggagtctgctaaatgttgccattagaataccaattaaccctcactaagcaaaccgaaattgcccccagtatctatgaattatgcctcaccggagacctcgcacagcaacccattgcaccgggacaatttgtcgatatcaaaatccccagtgacgcccttttattacgtcggccatttgggattgccaacgtcgaccgccaaactaacacgattaccttgttataccgcgttgttggtgaaggcaccacgatcttaagtgaatcaccggtgagcacaagcttgtccgtcttagggcctcttggtaacggttatccaattgaccaattagtagccggacaaaacgcgctaatcattggtggcgggactgggattccaccattacatgaactctcacggcaacttaatgcaaaaggcgttcacgttcaacacgtgttcggctttgcaactaaagcagccattttctatgaagatcactttcgcaagctcgggccagtcgcttatgcgacaaatgatggctcgtacggctaccaaggccatgttggtttattactcgatgcacagtttgctgatgcgacaacccgatatgatgctatttacgcatgcggaccaaaaggcttgttaatggccgtcgataatcgattcagtgagcatcccaatgcctatatctcattggaagaacggatggcttgtgggattggtgcctgctacgcctgtgtcaccaaactcaaacgtgatccaagcattcagctcaaaatttgcgatgacggacccgtcttcaaaacaaacgaggtgctcatttaatgacagacttagcagtaactttaccaggcttagctttaaaaaatccgattatgcccgcctccgggtgttttggcttcggtcaggaatacggtcgctattatgacctcaacgaacttggcgcaattattatcaaagcggcaacgaaagaaccccgacttggcaatgcgacaccacgggttgctgaaaccccaagtgggatgttgaacgcgattggcttacaaaatcccgggattgaagtcattatgcaagaaaaattaccctggttagccgagcattatcccgagttaccaatcatcgccaatgtcgctggcaatactgaagccgattacgtttatgtctgtgaacgcatcagtcaggcacccaacgtccatgccatcgaactaaatatctcatgtccaaacgtggcccatggcggtctcgaattcggtacatcaccagaagccgctgccacgttgacaaaggcctgtgttgcagtcagccaagtaccggtttacgtgaagctctcaccaaacgtgacggatattcgcccgattgcgcaagcagtcgaagcagcgggggcagccggcttctcgctaatcaatacactggtggggatgcggattgatccgagaacacgccaaccaattctcgctaatcaaacgggcggcttatctgggccagcaattaagcccgttgccatccggctcattcatcaagtccgttcaatttcgaagttaccgattattgggatgggcggtgtctcaacagctgcggatgcacttgaattaatggccgccggcgccaatgtcatcgcagtcggcactgctaatttcagcgatccatttgcctgtccaaagctaatcgccgcattaccagatgaactcgctaaatatcaactaaccgatttaaaatcattcggtctaccacaggagggcactcatgactaaccccttaattatcgcgctcgactttccaaactgggaaacaacgaatcgttttttagcacaatttccaactgatgaatccttattcgttaaagtcggcatggaacttttttaccaagagggaccacagctgattaaaacgttaaaagcgcgcggctatcggatttttctcgacctaaaactctatgacattccaaacacggttcaaagcgcgatgactgtaatcggccaactcggtgtcgattacacaacgattcacgcagctggtgggcaggccatgctcaaagcaggggcggctggtctgaaaaaaggcgccgcactcgccaacgtgcagcccgctaaactactagcgattacgcagctcacgtcgaccagcgaagcgcaaatgcaaaccgaacaactcgttaatgtcagcctaccagaatctgtcgcgcactatgcgcaactcgcacagaactcggattgcgatggcgtggtctgttccgctcaagaggtgccaacgattcgcgaacacaccaatgctgattttctctgcgtcacacctgggattcggccagcaacaagccaaaccaatgatcaaaaacgggctgtaacaccacacgaagccgcacaagctgagagctcggcgattgtcgttgggcgcccaattacgcaagctacaaatccatatcaagcttaccaagctatcaaatcagaatgggagtctttcaaatgacaacaattgcacaccaagtcgcacaagccttaatcgatattcatgccgtcagtctcagtcctaacaacccttttacttgggcgagtgggctaagaagtcccatctattgcgataaccgtttaacgattggttatccaaaagtccgcaagctcattgccagcaacttagctgcggcaatcaaagcgcaattcccagacgttgaagtcatcggcggaacagcaaccgcggggattccccatgctgcatgggtcgcagccgaactcgacttaccgatggtttacattcggtcgaaaccgaaagatcacggtcaaggccgtcaaatcgaaggaccgtttaaagccggtcaaaaattagtcctcattgacgatttaatttcaaccggcgggagtgtcttacaagcagcggctgccgctcaaaaagagggcgcagaagtccttggtatttttggcatcttttcatacgaactggcagccggccaacagaatttcgcaactgctaacttaccactaacgaccttatcgaatttctccgccttattagcggtcgaagaagccgctgataacttaactccagaacaagccacatcactcaatgaatggcgccaagacccacaagcatggtcagacgcccattagaatagagtgttaaccggaaagtaatggcttgcagaacacgtttagcgtgtgccatcagccgcaccaatcaaagaagcgttaccccaattcactttggagtaacgctttttattagtcttgcacaggtttgttacgtagcttttgaacgagttgctcgtctggtgtcgtataaagtgtttgttgcccttcgtaaatcacaaaccctggtcgcgcaccgttcggttttttaatcttcttaacctgaatataatcaactggcacggccgctgataagcgcgccttcgagaagtaggccgctaagttgccggcttcttgaagcgtatcttctgatggatctgggctatcaataatcacatgagacccgggaatgttcttcacatgcaaccagatatcagttttatgggcttttttcaaggttaattgatcattttgatagttattcttgccaacgaaaatccgggtgccatcactcgcatagaaaacttcaggttcactaatcttgtaacgtttctgcttcttggcaccggttttcttagcctttaaataaccttcagcctgtaattcagctttgatatcctctaaatctttgggttcagcaatttcaatttgcgccataatcgtgttgaagtaggcaagttctgcttcggtctttgccatttgttcattgacgtaggcaattgaattccggagcttctgatatttcgagaaatacttctgcgcattttttgaagggctaatctggttcgacaaggtaatcttaagcggttcgttattgtcgtagaaattgggcaacgtgacttcagtcatgccacgttcgacttcccgcaaataggtggtcaaaatttcacccttaatccggtaatcatccgcactgtcggctgcttttaacgttttttgtagttttttcagtttcttttcatccttttgaatctcgttgcggatgaagtggatgagcgcaccaccttgttgctgcactcggtcacgctgcgccttgtgtaagtaatattggtctaacagctcactcaacgtgtcaaaatggctcagtgtccctgtcaggctctcataagggaaggccgtgaaccacgacttcttgtcaccaactgttaacgttggtgtcacttggtcgaattgcttgaagaaatcagtcacaaccgccaaataattgtcatgatccattaaacgggtttgtagttcaacggcactttcatgactcatcccttggaagtgttgttgtaaccatttgacttgttcatcagcagcttcgttataataacttaaccaatcaagcgtctttaaatcagtcgtaaaaccatcaaccccggttgcagccggtggattaacataatcggcgccaggcattaagaaccgataacggttttgcgaaacaccgacgtgccggattaaatcgagaatcttattggtcgcttgattaatcaaaatcacattactatggcggcccatcaattcaacgattaagcatagttgttgtaagtcccccagttcattccgtgatttaaaggtgaatcttagaatccgatcactttcaatttgctcgatgttttctaaaatggcgccatctaaatacttccgtaaagacatcgcgaagttcggtggcgttgcggggtttgcataaggcacccgcgtcacttgcactcgcgcataagatgggtgggctgataggagaaggggataggtcttacgatttgcccgaatcgttaagattacttcgtttggataaggttgttgaattttcgtaattttgccgtctgctaaagttgtatttagctcatttacaacggcgtgggtcattaaaccatcaaaggtcattattgctcacactctctataattgaattgtcttacttattgtaacggttttgcagtggaacctcaaagaaattagttgtttgcaatcgctaacacgactattgtataatacaattatcaaattgctttatacaattaaagggggatttaccgtgcgctcaacctcagcaacgtttaatcaactgaatctattgtatcaagaacaaaagaaacactgggcgctacgactcgacttgaagttagcccaagtcaacattctaatggccattgaacccgatcaagaacgcatttcgcacgcagaattaattacgttaaccaaactcgatgcatcgacactcagtcggcagttaaatacgatggctcaagaagggctgttaacaaaagtgaccggggctgatccgcgccaacgcgtttacgccttaacaccgaccgccaagacggcattaagtacgttgcaacaacttcaaactgcacttgaaaatcacattcaacaaaactggagtaccgatgaacagcaacttttaaaaatcctactgaaccgttattatcaaagctttaatcgaccattaaaatgagacgccctatacatttttcggaaaatcggcatttttaggggaattaacctaccatttatgatatagttattaccgaataataaaaaagtaggtgtcaccatgaaaattgctgtagtcactgatagtaccgcttatctcacagaacagcaagtgaaagaccatcatctcttcgtcgtacctattccggttatccttgatggccaggtctatgatgaaggcgttgatataaccactgaagagttctatcaaaaattaaaaacatccgaaacattccccagtacatcacaaccaccactgggtgaaatgttaaaactatacgaagacctcggcaacgaagggtatgatgctgtcatcagcatccaccttgctagtaccatctctgggtttgtcacgacattgaaaaatgcggcaagcaccatcgataacatccaggttgtcccatacgattcagggattactgtgatgttaatgggctacttagcaatggaagcggccagaatggcacgcgacccagaagtgaccgtcgaccagattatcgcacgccttgacgatctaaaaagcacaatggatgaatgtttcattgttaacgacttacaaaacttagtgcgtggtggtcgtttatcaaacgcatctgcttttattggtagcatgttgaagattaaaccgcttttaacgtttgacgctgacactaacaaaattacggcatttgagaaggttcgttcattgaagaaggcttacgcccgcgctgaacaaatttttgctgaaacagccgaacgtgttgactatccattacgcgcactaatcattcacgctaacgatgaaccagcagcgattgcatggcgtgataagcttcaagcaaactatccagacttaccaattgatatcagctactttggcccagttatcgggacccatcttggtgaaaaagccattgcacttgcttggattaaagattttgataaagcctaatttaaaagcctgtcgaacaattcgacaggctttttttgtgacttataagatagaaacgggttcttctaaggtaaccaacttcgtcccaattagcttataaataacggatttaacggctactttttgaacaatgttgagcggttcctcgtttaaattgaattcattaaccgttgattgcgcgttaatattcgcaatttcggcattaaataaccgcacaaactgatcatatgccttaccagcggtgtcgtttgccaacgattgcgaaatcccttgtttaatgacatcgagcgggaagactaatttcataatgctgaccacaatcaattcggctaaatgatcccgattatagcgtttcttttccggtcgttcaataatcgccattttgacatagctattaatcattgttttcgttattttaacgtccaacaaaggactcagtcgtttattgacctcactaatgacttggtccatatagaggtctaaatctggaaattcagaccataatggtaaccgcaattgttgaaagtcacccaaccatttttcaaattcttgtgattgcatactgattaacgccaccaatctgttgatagtatatttattatgccatagcaattatcatttgtcactaacatagaatcgaattctattatctattgacttataatctacattcgcgctataatactcggcaaatagagaaaaagaggcgagaaccatgcaactttccacgattaaacgacaacaactgatttatgaaatatggaatgccattacccacgggattggttttttcggtagtttaacgttagtcatcatgctcctggtcaaaagcattcataaaacactctcaccagtcgcgattgctagtctagcagtgtatggcgccacattactgctactgtatctcgcttcgactttatttcactgcttagcatttaccaaggccaagcgcgtgtttcaaatattcgaccatagcaatattttcttgctgattgctggtacctacacgccatattgtttgatttttattggccatgcaacaggaattagcttactgattgcaatctggacactagcgattgccggtattataacgcacattttgagccacggtcggtaccaaaagattgaaacaacgatttacgttgtgatggggtggttatgtttattagctggtaagaccctttatgtcaacctcagtccagttggtttttggctgttagtcagtggtggcgtagtctttaccgttggcgctctaatttatagttttcctaaaattcctggcttacatttgatttggcactttttcgtaatgctcggaacgaccctgatgtttttttcaatttacctcaacatttaacttgaaggagtacaactcatatgacaattaaaattgtaacggactcatcgattcaactgacagcagacgaacgcgctaaatatgacattcacatcgtccccttaacgattcaacaaggaaatgagtctttcattgatggacaaaccattacccgcgctgaatttttaagtcgcttacaaaatgcaacgaccgattttccaacaacaagtcagccaactgtcggcagtttcgtcgatttatatgatcaattaggggctgatggtagtacgattctatcgattcattgtaccggcttgttaagtggcacaatcgaaggggcacacacagcagcccaccaatcaacaagtgacgtacacgtgattgatagtaaagcaatcgaccgtggacttgcttatcaagtggttgctgccgcccaagacgttgaagcagggaagcctcttgatgatattatcgcgcatctcgatgacatccgtcgtaaaaccgaaacctacgtctttttagattcacttgacgcgcttcaacgcggtggtcgaattagtagaatggccgggctattaacgaaaatcattaaactcaaggtaattgtgcgcttaacagatacggaattagaagtcgtcgcaaaggggcggggactaaaagcttttacaaaagaactcaacaatatccgtgaatacttagccacccaagacgttgcggaaatcggcatctcacacgtcggaatcacggatgaactatccgctaagatccaagcaacgcttgaagaaacacagccccatgtgccttatacagtcgcactaaccagcccggtcattatgagtcacgttggcctaggggcgtttggtattttctatcggacaaaataacagctgacaagaacgtctcattcgaggcgttcttttttattgccccttaaaattgcgcaaaatctagttgcgttatttcaatgaacgttctaataagagaggagcatccagatgcggacaaaaacatttgaagcaccggttgtcttagacaaagccatgcttgtcttttggcaacaaggctatgagaatacctcaatgcaaaacctagttgatgcaatggggattcaccggcgcagtatttacgatacattcggcgataaacatgaactgtttatccaagtactagcacattatcgtgaccaaattaacgagcgtttcgagcaagtactggcaacacataccgatttaaggtcgcgcttaacagccatttttgaaatatttattgaccatccggataaccaaccagccggctgcttagtggtgaataccgcggcaacgttaaattcattagaaccagacatccaaacgctgattcagcattatttaacccaagaaaaagcactgttgcaggcattactgattgccggccaggccgaactagaaccgtctgttgcaattgatcttttagctgcatcgcttcaaagtgcgctcattggtatccgggtcatggctaaagtgaacccagattcaactacgctaacagcaattgtgcaacaaaccctacaaacactcccgtggaaagaggttttctaatatgaaagcagctcaaattaaaaaatataatcaaacactagctgtcacgattcaagaaattgatcgcccacaaccgctagccaatgaagtactcgtcaaagtcgcctatgcagcggtgaatccattggatccaatgaatatccgcggcgatactaaattaatgcaaaactatactttaccactgactttaggcaatgaaattgccggtgaaatcacagcgattggaacagacgtcactgatttcaaagtcggggatcaagtctatgcgcgtttaccattggctaaaatcggtggctttgctgaatatgtcgcggttaccaccgatgcaatctggtacacgccaaaggatttatcgctacgtgaagccgttgcaatcccactgactggcttaacggcttatcaggggctatttgaggaattggcagcccaaccgaaccgaacgctgtttatccctggtggttcaggcggtttcggtcaaatagccatcccaatcgcaaaatcactaggcttaaccgtgattgtttcaggcaatgcagtcgcgcgagatcacattttgaatttgggtgctgaccaatatatcgattacaaaacaaccgattactgggaagttttagatcaaatcgattacgtgattgatacacgcggtggagcagatattgaacgtgaaatggcgattatgaagccgggcgggcggattttaagcttgattgccggtccaaacaaacaattcgctaaacaattgcaattaccattttggaagcaactcttattctcgttggccgggcggaaatgggatcgcctcgctaaaaaagcgggcgttgaatatcgctttattttcgttcgttcagatggtgcccaactcaaaaaaatcactgaaattattgaacaacaagcgattgtaccagccatcgatccgcatcaattcgatttagcacacgttaaagaggcactagaacttgttgctcacggccatccaaaagaatcgtttatattagactggtaaagtggtgattaaggttcaagcgggctaatcaagatgacttatctaacaacccccaaccaatttattcaagatcaacaaggccaacggtttgcttaccgcgaagtgggtaccggtcgcggcttaccacttgttttattgaatcacttatcagccactttagataactgggaccctgcattaattgacctgatcagtcagcaacgacgcgtgattgtctttaataatcgtggtgttggtttctcggatggcaaagtccccacgacgattgagcaaatggtagctgattgttatgcttttataacagctatgcagctcactcaattcgatttacttggattatcgatgggtggttttgttgcacaggccttcactttaaaatactcctcaagcgttaatcacttaattttagtcggaacaggtccccagggtgactcagaaatcgccaaagtggggcgcataacaacttttgacttaattcagtccttcttaacgcatagagacgttaaggaatacctcttcttcaccagaacgccccaaggcaaacaggctggtaaagcgttcattaaccggttaaaacagcgtgaaattgttgaagataaagccattacgttagccgcttatcgtcgtcaattaatagcaattaaacagtatgcgcacgatcaaccggcaaacctggcacaaattaaccaaccaacattgattgtcaacggcgatcacgatcgaatggtacctgttaatggttcatatgaattacatgaacgaattttaaattcccaattaaaactttacccagatgctggtcatatggcgttattccaaaatccaaatgactttgcagctttgttggctcagtttttaaatcactaattacagaagcgtcattttaatatggcgcttttttgctgcgcttaaacgctggtgacgagtgggtaggcttagctaattttttaaatctattttagtttacataatatatattatgcgaagaaatacttatcccttgaaagagcgctaaaataaccacttattatccaacatcattcaattgatttgatgaaccgcacttaacgcgtttgttttttacactgcacgattcataaactattacaagttactcaacgccaatatgatgaatcaaactgactggccaaccgatatcgccaaacttaactttaaatgcagaattcatctaagctcaggcacaaatccgtgattaatctgacgattatgccagattttaattggtaaatacgcatattaacacatcttagccttaaaactcacatatcaaatcgttaaaaaaggccttaaacgttgatataccagcttttaaacggaataaggatctttaggttgctatgcagatagtcgaataagaccatctgatcatcagtttgcggaacggtttgcaatacaagtgttgttaaaattatggttttaacaacacttgtagtattctcacctcatttttgctaaactatctttaaactgttaattaaggagtcttccatcatggatcaacaacgttacttagaactctgcgaaaagcaactcgccaatcttccggattacattcgtaaattctacattaaccgccaggcaaacgcctactcttctgcaacgctctatcaatacttacaagaatacgttcgctttttcacctggttagttgatgaacagatcgtcgcggtcccctctatcgaccagatgccactgaccgcactcgaaaaaatgaaactcgaagatattgagctctacaagatttttctaatgaataagcgtaaacaaaataaccataagctctcctttcaagccgttaaccgctcgattaacgcattaaatgcgctctggtacttcttaaccattgaagccgaacaagctgatggtgagccttatttttaccgaaacgtcatgaagaaggtgaaactacttaaagcttcagaaacaatggcgacacgttcacgacacatcagcaaacaactgctgaccggtgaaaagaaacacgacttcatcaccttcatgcaagttgattaccctaacttgctttctaatcgccaactggcatcatacaagcaaaattgcgaacgcgatattgccatctgtgtactggcgctggcaacgggcatccgactatcagagttggcccaagccaacatcaacgatttgaatcttgaacaacttacaattaccgtgatccgtaaaggcggacagcaagatactgtcccaattgctccgtggagtttaccttttttaagggattactgccagattcgtaaatcacgctatctaaaagaagataatgaacaagccttatttgtcagtcgctatcgtggcagcgccaagcgtatgagcaactatgccattgaaaagttagtcgcgaagtattctgaagcatttggcgtgcgtctcacaccacacaagttccgccatacacttgccactgatctcatggcggcaactcatagtgaaacaattgttgcgacccaactaggccaaacgaccacgcaagctactcacttatatacgcacgtcgttgctgatgaacaacgctcggcaatggaccagcttgaatagccactattagtgctcttcttggcaacgattatcaatgtcgttctaacagtcatttggtttacatcaattcgtcgatttacacattgcttgacttataccagctatcgagtatactgaaagcgttcctaaaaattaaatgttaaccatcgcaaaggggagccattggctgagagtgattttaatcagacccttcgaacctgtttgttaagacaagcgtaggaattgtgatggagttgaaatgataactccttttttgtgttggttgaacaagaaaaggggttatttttatgcaacatcagcgtctattgattcagattgaaggggcaatcatcgcggcatttgccgtggcattggaatacatcccccatacagtggggccttccgcaatcgaagtctcctttgggattatccctattgtaatctacagtttacgccgtggtgccattcctggaatggtctccggcttaatctggggtctactagacttaatcttacgtggattaggaaacggtagtgtcttgaacgtatggcaaggattgctagaatttaccattgccttcatggttgttggtttagcaggtatcttacaacgacctattcaagcaagtattcaaaatcatacaaaagtcaaaacgatgacccttttattgatggccgcattttttggtacttttgcaaaatacttctgccacttcttagccggtgccgtttattggggctcatacgctcccaaaggtatgaatgcttggctatactcgctcactgttaacggtggcagctttatcgctagcttcattctaaccggcatcgttctatgtatttgtttagccatggtgcctaagttatatttaccaaaagacatggttttacacgtacaatctgaaaaataaacaaaaaaagagccgtattaacacttgaatggtgttaatacggctctttttaattcccttaacgatccgttctagctcgtaatgcatataagattgaaactgtatcgacaacctcttggaataaagcccccactaatgctggaacaatcccggtgctggcaatcaacattaacccaatacagattgcaatcccaatcaaaaccgcctggcgagcaacgcgcatcgtgtcacgcgcgatttgaacggcacgactaacccgtcctaaatcatcttttagaatcaccacatccgctgattcacttgcggctgttgcgccatgggcccccatcgcaatcccgacatcagcacttgccagtgacggtgcatcgttgaccccatcaccaaccataattagtgggcgttggtcttgcagtacttgttcaattaaatgaatcttatcgactggcagacagcctgcatggacgtcatcaattccgacttgttccgcaatctggtgcgcagttgtcgcttgatcgcctgtcaacatcatcaaacgcgtaatccccagttgatggagcgtctgcatcgtggccggtgcttctggtcgtaaatgatcgataaacgtaatgtaccccgcatattgatcattgatcgcaacgtaaacagtggtttgttcttgcagaggctgttgcgcatctggcgtcacgaattgatgtttcccaacacgaaccgtttgtccagacgacagcgtcgcaactaccccagcgcccgttgcttcttttaatgtttcaattggttgtaattgttctacctgtgccgctttaacaagtgaccgtgctaaaatatgcgaagattcttgctccgcactagccgccaattgcaataaatcggttggtgcgataccaatcactggcacaacttggtcaaccgtcaattgaccattcgtaattgttccagttttatcaaacgctgctgatttagcagacgctaatttttcaattgttgtgccagccttgacaataatcccgtttcgactagcacgactcatccctgagattaacgcgataggcgctgccaatattaatgggcacggcgaagccacgacaagcacttctgcaaaccgtactggatccttagataaccaccaagctactccagcaatcacatacgcaactaatgtaaatggcacggcatatcgatcagctaagcgcacaaaatgcgctggttgtgccgcagaggtctctacaagccgtacaattgcttgatattggctattaacggctaattggtcaacttgcatggtaaccgacgtatcgccgttcacagagcctgacatgagctcatcatttagtgctttttcaacggggcgtgattcacccgttaacgatgattcatcgaataaagcacttcctgcaataatatgcccatcaacagggaccaattcgccaggtttaataatcacttgatcaccaacttgaagcttatcgactgaaacatcttcgaccgcatcattaacaaggcgatgcgctgtttgcggagaattatcaagtaatgtctttaactcacggcctgctttatgcgctgcatagtcttccaatgagtcgccaccagttaacatgaccaagaccattaatgctgcccaatattcaccgaccgctaacgtcgcaataatagcggtaatcgctaatagatccaccccgtattgaccagattttagcgttttaatcatctcaataaacatcgagagcgctactaagctccccgctaaactcactaaaatctgtgcccacaatggctcatgtagcaaaaacgccaagcatagcgcaatcacacccacactaattgttaaggcaaacttgatggtatgtttcatcgtcaatcgctccttcttatgaattcatttacattataacacatttttagttagattagaataattccaatctggtggcacacaaaaaagcccccaaattaatgaggggtcttttttgcagatagttggtttataatagcagtctgcacggcagtcatcgctgctaataatagagtcattcgttttatcacgggtgatgttttttttgattagagagtgctttttcagttttatgaataatcgattcaatcggggcttgtgcctcgactaaggcttcgactgttatgtctgtgtgcccgttcaataaatcacgaccaacttctaatgcgtaaagcctattttttaataaagtaaattgagccgaacccgctacaaacttcagctgactcttttggcaatttcgaattgtcgcttcaatcacttgaattgcatcaatgctttcctcggtcatttacctatcctcctaataaaaaaataaagccccgaaggactttattattaatcgttattaaaatgcttctgttaattgtggaaccacttgtttcttacgtgaaacaacaccggctaattgtgcacgatggttgttcaattttacgttgaatgctttttcaaaggcttctgctggttcaccgataacaagcgcttctgagttactgtttaagatgtcagtaatcaaaagtacgaataagtcgtaaccattagctttattgtctgcttcgatagcagcttcaaaagcagcttggcgtttgaagaccgcttcgatatcaactgtattcacttgatcgatacgcacttttttaccagccatatcgaatgttttagcatccgcttcaattaattcagcttcgctcttatcatctaagttagtgcccgcttttaacatttcaagaccatatgattcgaaatcaatatcagcaatttcagccaatgtcttaatcgcaatccgatctttttcagttgttgtaggtgatttcatcaacaacgtatctgaaatgatagcactcatcattaaaccagctaattgagctggaatttcaactttgttttcgttgaacattgataataaaattgtgctggtacagccaactggttcagcgcggtagaataatgggctgactgtttcgaagtttgcaattcgatgatgatcaacaacgtgcgtcactgttaaatctttgatatcggcaacactttgttggctttcgttatgatcaaccaacatcacactgtcaacttcactgcttgcttctttaatgatgcgaggggttgctgctgcaaaatgacgcaatgcatagcttgtttcttcattaggttcacctagcgcaacggcttctacgtcgtttcctagttgttgttgaagataagcaaacgccattgccgcaacaattgcgtctgtatctggattttggtgaccgaatactaattctttactcatatttatacagaccttccttttaaaaaaataacatcctaattataccaaaaatattagacgattctacggttttgctctctaatccgtgttaaataatctttttcttctaaataatggtcgaattcacggaaaaagctattaatccgtggaatatcttccttttccttgcggaagacaaaagctaattcgaactgaatggccggatcaaattgaaccgcgtttcccttaagtcccaaattatgtgcttcataaaaactctttggtaaagctgtacttaattcagttgcttcagcaaaacgcatgatttcaaatggtgatgtgaattgagccgcactcactggacgatcaaccaattgattcttataggcttcactgatgaattgatttaaatagtattcatctgggtatgtcacccatttattatctaatgtatctttaaaacggatcttcttacgcgtctttaaagcaggatcttggctgataaagagtaagcgttcatccacaatcttatgtgacttataaggtttccagttcttaatgctgtcatctggcaaatacataatggcaatatcaattttattattttcaagtcggtcccagatttctttccgagtcaataagtgcatgctgacttcgatgtcaggaaattgtttatagtattgaattaagaaggattggataacactgatttccatcgatgctaaaatcccaatattaatcttaccgcgcgtcgcactcgttgaactttgaatttcatccgtcgcagtatttaataaatcatgaatccgatgggtagcatccaacatcgtccgaccagcatccgaaatatgtaacttcttgccgactgaataaaataaaggcgcgccgactatccgttctaattttttaatctgttgggttaaagcaggttgcgtgataccgagtagttgtgccgcttgggtataattcatcgtttccgctaactgtaggaaataggttaatgttttagaggagaagatattttcttgtcttgttttcattttcaaatctccgttctttagtttacgcctatcattataataataaagatataaaaaaagagcaacccctttcgttgctcattcttattaaaggcttaaaattttcttatgttagcgttgctgctttggatagtctgctgtatgcaatagacgctccgcattgacaacgcgatcgtgggtcggtggttcaatccccgctaacggatatttaatccccatcttttcgtatttcacgattcccatcgtatggtagggcaacacttcgactcggtcaacattgtttaacgtttgaatataatcccctagacgagtgagatactcatcgtaatccgtccgttctggaatcaagacgtgccgaatccacatatgatgaccatgatttgacatatattcaatcatttccaaaatatgttcgttagaaaagccggttaactttttgtgccccgctggatcaatatgcttaatatcgaccattgaaagatcggtatatttcatcaattctttgaatttactaaagaagggttctttatacgtaaacggctgcccacaagtatccaaacaggtattaatcccttgtgccttacactttttaaataaatcaattaaaaaatcaatttgaattaaggattcaccaccgctacaggtaattccgccatctttaccccagaaggccttatatggcagtgcctttgcgattaattcgtctgcggtataagcttctccgctaccaatattccacgtatctggattatgacagaattcgcaacgcatgcgacagccttgtaaaaaggcgacaaaccgaattccgggaccatccactgaaccaaatgtttcaatcgaatgaacatatccaattggcacctctggtgttatcggggtttctggaacaacattttcagttgataaccgtgttgtaaatttaattgtcatttcactttcacctcttaaaagaaaagctatgctttctggtaaagtcgttaattcgcgttaacgaccttaccagaaagcggatattgctatccactttcgttagattacatttcgtcaaagaacgttcttgagataacgtcgtcttgttgttccttcgttaaatcagcgaagtagacacaataacctgaaacccgaaccgttaatgttgggtattcttctggatgttgttgtgcatccattaaggtttgcttattgaagacgttgatatttaaatgcatcccttgattaatcatgtaaccatcgaccatgttcacaagcgcatctttacgtgcttcatcatcatgccctaatgtatttggtgtgacaccaaacgtatttgaaatcccatcagttgcataacggtatggaatcttcgcagttgaaagtaatgatgctaaagcaccgttcttttcagcaccgtatgctgggttagcacctggtgagaatggttcgccagcttgacgaccatttggtgttgtcccagtattcttaccatacacaacatttgatgtgattgttaaaacagatgttgataattttgagccacgatataaatgatgcgtattcatcttcgtatagaaagtcttcactaaccatttagcgatatcgtcagcgcggtcgtcattgttcccataacgtggatagtctggattttgcgcttcgaaatcgactgccataccgtcttcatcacggataactttaacttggccgtatttaatcgctgagattgaatcaaccgcatgtgatagaccagaaataccagtcgcaaatgtccggtctaaacgactattcttcaatgccaattgtgctgattcatagtaatacttatcatgcatgtagtggatggtgtttaaagcattaacgtaaacgtctgctaaccaatctaacatcttatcgtatttacccatgaattctttgtaatcaatgatttcacttgtaattggttgataagctgggccgacttgagctttgcctaattcatcgatcccgccgttaattgcgtaaaggattgtcttagccaagttagcacgcgcaccaaaatattgaacgccgtctgcaattggttgtgcagaaacacagcatgcaatcccataatagtcactcccccattcattacgcatcaaatcatcgttttcgtattgaatcgttgaactcttaattgaaacttctgttgcatagcgcttgaaaccttctggtaagcgatctgaccaaagtaaggtgatattaggttctggagcagcacccatattttccaatgtcttcaagacacggaaggcagtcttagtgacatgatgacgaccatccataccaatcccacacattgataatgttgcccagattggatcacctgagaataatgaattataatcttctgtccgaatgaaacgaaccatccgtaacttcatgacaaaatggtcaaccatttcttgcgcttcagcttctgtaattaagccccgctctaaatcacgttggataaagatatccatcgttgtatcaatccggccaactgacatcgcagccccgttttgtgtcttaatagcggctaagtaaccgaagtaaatccattgaattgcttcttgggcattcttagcaggtcttgaaatatcaaagccatagctagcagccattttcttcatatcttgtaaagcacgatattgttcattgatttcttcacgaagacgaatgacatcgtctgtcatttcaccgtcgccaacaccattaaagtcacggactttttcttcagctaaacgatcaatcccatagactgcaatccgtggtaagtcaggaataatccgaccacgtgcataggcatctggaaggcccgtaataatcttgtagtgacgtgctttacgcatgtctggtgtataagcatcaaaaacaccttgattatgtgtcttgcggtattcgttaaaaatcttgtgttgttctggatcagtcttaaagccgtatgcttccaaggcatcttcggccatccgaatcccaccaaatggcatgaatgcgcgttttaatggggcatcagtttgtaatccaacaatcttttcaagatccttgtttaaataaccagggccgtgtgacgtaactgttgcaggattatcattgtctgcggctaaaacgccacctgcttcacgttcttgtttcttcaattccattagttgatcatttaacgttgttgttgcttcggttggaccagctaagaaactttcatcaccgtcataggcagtaaagttttgttggatgaaatcacgaatatcaatttcatcttgccagtcacctttgttaaagccgtcccaatagtcggctaagttaattttttcggtttttaccatgtggattacctccattagtcaagtgttgtttatcacagttttcacaattttagtataacacatcacatagtttatgcaagccctttctttttgattgtttagaaactcttaaactcttttgaaagattgatttatagctatttatctacttaaaatatttttataaccccaccatttaaattgtgcaaaacttattttgctgttatagtacaaaaccaaaaaatccgcatattatgtataacagaaaaaagcaagtcatcacatagatgacttgcttttttattattttgactcgtcttcatttttaactggaatagtcgtttgaacaaatgccggttgtccaacttcatcaacatccatcacaaaactaccgttcgaataacggtcggcagttgcatgttgataagggttaattgcaatcacttcttgctgatcagtatgaatcagtaactcgcttgcctgctcaacactaaccattgctgctacccgatgtggttctttcttcaattcacggagaattaagaccccacgacgcgcacgacttgttaaaccaacctcacttaagagcatccgtttaaaggcgccccgttgcgtcacaatggcaacggctgcatgtttatcttctggatgatataacgtaaagccgatgacaacatccccatctttgagatccattaatttgaccccactggccttagcacctgatacagagacttcagataaggtaaaactcaatccataacctttatagctagcactaaagacggctagcccttcatcacttggaatccagttcacgtttgtcacatgagcatctgcatgcaacttaataaagtcttgtgccttagaacgatatgttcgacttggcaagaggtcagagaaggcagtttgtttaatatagccatcatccgtcccaatcacaaagtagccagcctgttcatttggcttaaaggcaaatgctgcaataatcgcttcatcagccgccaaaccaatcgattgcgaaatatgttcgcccatttccttccatttcaaatcagcaatttcatgaactggtcgttgaattaaatgtccgtaattggtgaacatcatcaattgatctaaggtttgtagtggcttttgtaaaatggcaaaatcgccgtctttcaaaccgctgtcggccccttcagatgcttgatacgagcgcaaactactacgtttcaagtagccgtcatggctaactgcaaccatgacggtttcgtcaacaacagtcacacttgtatcaatttcaagcgtctcaatttgtgcttcaatttcagtttttcggtcactccgataagttttgaccattgcttttaactgcgccttaatcacccgtgcaagtgcttttggatcaccaagaatcatccggtattccttaatcgctgcatcaagttcagctgattcttgttccaaagcagtcacatcggtattcgttaaccggtataattgcagtgaaataatcgcttcagcttgggcttctgtgaaggcgtagcttgccactaaattatctttagcgtcttttttattcttgctaccacgaatcgtcgcaatcacttgatctaaaatcgagagcgccttgattagccctgcgacaatgtgctgacgatccaatgccttttgtaaggtatattttgtccgccgaatcacgacttcttcttgatgttccaagtaggcatggaggatttctaataagccaacctgtttaggttgcatatgcgagatggcgaccatattaaagttatatgtgatttgcagatccgtatttttgaacagataattcaagatcccttgactatccgcttgctttttcaattcaacaacgactgataagcccatccgatcactttcatctcgtacttcagcaatcccatcgaccttctttaaaacgcgtaattcatcaatcttcttgaccatcatagccttgttgacttcataaggaatttcgctaatcacgatttgttcccgattgccgcgtaattgttggatgctggtttttgcccggacgacaactcgaccgcgaccagtttcataggctttcttaatcccatcgaccccttgtaagatcccaccagttgggaaatcaggtcctttgatgaaggtcatcattttttctaacgttgcatcgggatgatccaatagatagaccaagccatcagtcacttcacctaaattatgtggcggaatttcagtcgcgtacccagctgaaatcccagttgccccattcactaagaggtttgggaaccgagctggtaaaacagtgggttcttcagcggtatcatcgaagtttaaaacgaaatcaaccgtctttttatcgatgtccttgagcatttcaccagcaatcttacttaagcgtgcctcagtataccgcattgctgctggtggatccccatccattgacccattattcccatgcatttcaatcagtggttcacgtaatttccagtcctgacttaaccggaccatcgcttcataaattgaactatccccatgcggatggaaattccccatgacattcccgacagacttcgctgacttccggaaccctttatcataagtattcccatcgatggacattgcgtataaaattcgccgttgaacgggttttaacccatcgcgaatatctggtaacgcccgctcttgaatgatgtattttgaatagcggccaaagcggtcgcccatgacttcttcaagcgttagctcttgaattttttgtgcttcatcagccaaatttaatcactcacttttctattcgtctaattggtcaaataaatccacttcagcgcttgaagttgtcggtgctggttgaccattcgttgtatctaagatgctaccatcttcagccattgtgaacttaacgttttcttcaatccacttccgacgtggttcaactttatcgcccatcaacgttgtgacgcggcgttcagctaaggctgcatcatcaatccgcacccgaattaacgtccgactcgttggatccattgtggtatcccaaagttgatcagcattcatttcacccaaccctttgaaacgttgttgactgtagcctttacccatttctttagcgacgactttcaattcatcatcagtccaagcataggcaatcttcgtttttgccccagcacctttttggagcttatacaatggtggcaaggcaatgtagacttttccggcttcaattaacggccgcatatagcggtagaagaaggttaacaacaaaatttgaatatgggccccatcggtatccgcatcggtcatgatgatgactttatcgtaattgctgtcttcaagtttgaattcagccccgactccggccccaatcgtgtaaatcatcgtgttgatttcttcattttttagaatttcttgtaatttcgctttttgagtatttaaaactttgccccgcaatggcaaaatcgcttggaatttccgatcgcgcccttgcttagcagaacccccagcagaatccccttcgaccaagtacaattcattcttcgccgcatttttcgattgcgctggtgttagcttcccagataataagccatcggatttcttctttttcttaccatttcgactttgttcacgtgctttacgcgcagcttcacgtgcttcgcgtgcttttaatgatttacgcactaaggcttgcgcaaattcaccattttcaagtaagaaaaagctcatttgttcataaaccaaactatcgacagctgtccgcgcttgtggcgagcctagcttacccttggtttgcccttcaaattgcaagagttcttctggaatccggacagacaagacggcactaagaccttcacgtacgtcggagccttccatgtttttatctcgttctttgagcaagtttaccttgcgggcgtaatcgttaaaagctttggttaagccggctttcatcccagcttcatgggtcccaccatcacctgtccggacattattcacaaatgacatgatgttttcggagtagccatcgttatattgacccgcaaattcgacttcaatgtcttctttggtgccttcgaaatataacttattaccaatcgtatctttatcttcgttcaaataatcgacaaatgattgaatcccttctgggtaatggaagacatcttcacgtgctggctcagcgcgtaaatcggtcaacgtaatcttgacatctttgagtaaaaaggcagattcgcgtaatcgttctgctaaggtattgtagttataagtagtcgtttgaaaaattgtcccatctggcttaaacgtaattaacgtgccgtttggttctttagctttgccaacttttttcaaggtaccaaccgggtggcccccattttcaaagcgttcttcgtaggcaacaccatcacgcacaacgcggacggtcaaccattcggataaggcattgacgacactcgcgccaaccccatgcaaaccgccggatgttttataactgttttgggtaaatttcccacctgcgtgaagcactgtcaaaataacttcaatcgtaggaatcccagattggtgcatcccagtcggcatcccacgaccatgatcacggacactaatactattatccgcgccaattacgacgttgatttctgaaccaaaaccagccaaggcttcatcgacagcgttatcgacaatttcgtacaccaaatggtgcaagccgcgaccgtcagttgagccaatgtacatgccaggccgttttcgaactgcttctagaccttctaagacctgaatcgaattatcattataatcttgtttttgatttggcattcaagtatgactcctttgtttaaaaatgaacagataaggtatattatcaacaagtttggatgattttacaatcaaaaatttaaaatttcttgccaatacaaatgtatgttcgtattcacctattctaacatacaatattccttttcccttgtcaaaatgctaaaataggggaaacaaatgccacaaataggagtttttgtcatgaaacttagtcttatctttattcttgcgtacctgatcggttcgttcccatcaggcgttattatcggccgcgttttctgtcacaaagatccccgagatgctggaagccataatatcggcacaactaactcgtatcgcgtgctcggcccaatcgctgggacagccgttttatttcttgatattttaaaaggcacacttgctgctagcctaccgatgatttttcacatccccaatcatgcattggtcttaatcgtcggcttagcggccgttgtcggtcatgcttactccatctttttacactttacggggggaaaagccgttgcaaccagcgcaggcatcttactggcatacaatccacttttcttcgtaattgccagtaccatctttatcagtgtcatcctgattacaagtatggttagcatggctagcatcctcggtccattgatgattgcgattttatcgttttacacgcatgattggctactcggttcgattgcgaccttggtcttacttttcctggtctaccggcaccgcgaaaatctacaacgcattaaaaatggcactgaaaacttagtgccatttggcctgtactatcgctataaacaaaaacatcgataactaaaaaaacgccgaacgggcgtttttttgtgcaatcagttaaagatcaatcaattgttcccgttcattgtaaaatgatcgataagctaagtaacacgcaatcactgaaccaagactcgttgccgataataacataaaggtcactaatatctggtacataatggccttgactggatcaattccggcaaaaatcaggcccgacatcatccctggcaggctgacaagccccatcgttttagcggaatcgatcgtgggtgacatccccgtacgaatactctcacgaataatggcaattgatgcttgtttagcggtcgctcccaaggcgagtcgttccaaaacaggttgccgttcatccttaaattgcgccagtaagctgcggtaactcaagccaatggcgaccatcgagttggaagcaatcatcccagtaattggaataatttgcgatggaataaacttaatcgccccagataaaacaagtaatcctaacgtgaccccagtacttgttaaaattgcgataaatgaaattggaaacccgttgcgtagtttccccgcccgctttttggcatttgctgcggcgttaaaaataatgatcagcatcatcaataacgttagccacacatcgttaatatgaaaaatgaatttcagtaaataaccaacgataaataattgaatgattgcgcgaaaaacactgataatcatatctttttcaagaccgattttttcatggaagctaatgactaatgcgacaaacactaatgtcacagcaaacgtcagtgaaagaccattaacggctaagttcatcttgatttaccaattcgccagcaacaatttgcacctggcgccctttccgttgtaattcttctgtatcgtgggtaatggcaataattgtgagcccgcaatcctcattgaggtgctggacaaacgccaatacaattgccttattagcggcatctaaaccagtcgtaatttcatcaagtaataaaacttccggtggaaataaaacattacgaatcaaggcaattcgttgcttttcaccgcccgataacgtggtaatttttttcgttagtggcatgttggctaacccaaccgctgccaacgctttttcaattgctgccatatcgaccggtaaattacgaatctcgtatggaaaacgtaaattatccccgattgtttcaccaaataacgttgcttgttgaaaacaatacgaaaccttttgtcgatactgattgggactaaactgggtcagtggctgatcatttaataaaatggtgccacgtgtcggcgttagtaagtccgcaattaaccgtaacaaggtactcttaccacccccagaaggtcctgtaatcgttaagtaactgcctttttcaacggttaaattaatgtcggttaaaatcacttgttgatcaacctgataagataatcgttcgatttttaattgaatcataagtccctcctgataattatttaattcatagtatacacgaaattcacttaattagtgtcttctgctgattgaaaaaaggacacctaaaagcttatactaatattaggatatattaagtgatggacgttccgtccgctctggaaaagagatgttgataatgttaaatagctttccgcaagtcatgacaattgccggttccgattctgatggcagtgccggtgcgcaagcagatttaaatactttttttgcccgtaatgtttatggtatgagcattttgacagcctgtgttgctggaaattcatatgggattcgtgctagccaagcactgtctcccgactttattgatgccgagtttgaagcaattgcagccgactttcaggttcgcgcttgcaaaacaggaatgttaaccgaccgtgagaccattctaaccgttgctaatcagttgaaaaaacatgactttggtcccctagtgttagatccggtcattattaccaagcatgaagcattgttgttggcagatgatgcttttaacacactaaagacagaattaatgccccttgcaactgtcctaacgcctaatttctacgaagcgcaaaaattaactggtattgaactgaagacacctgctgatttccaagctgctggccaagcactattggcaatggacgcaaaaaacgtcatgattaaaggccatcacgaggccggacaatcaatcgttacagactacgtttgccttgccgatggacaagaattttggctatcagaaccttacgttgaaactacccatattaatgggacgggcgattcactttcagcttgcatctgtgctgaaatcgctaaggggcagacaattgaggctgccattaagaccgctaaacaatttgttcaccgcgccatcgctaacccgattgaagtcggccacaagtacggtccaattaaccaccatgcttaaaatacaaaaaagcccatggatttttccgtgggctttttgaatgtttagtgttctgcttcttcaatatcggcattgacttgttgtaagtcaaagtcactctttaaaaaagcttcgttatcacttgggaagtgctgttcaaacgtttcaaacggttggagcgtcatttgagcatcgaccacggtatagtctagaatatgaccgccaaagtcgtgcgtatcgtttaagaagtgtacgtgatagcctgcaacagctgcgccttgataaagcgctggtgcataatacccaatcaacgtgcccgttacgtctgtttgttcaaactccggttgcactcgggttgcagcagtcaaattcggataaggctcctgttgtgtttggacggcccgcgtatgcatgactttgaaagtcccagtcattttaaccgcaaaaaacaagttttttaacggtgcttgcgctagaatttgcgtttctaactcagcctttgtgcgttgatgaaccgcttgtgtaggtaatgatgaatcttgccaatgcactgtcgcaaatggaactgtcgcatcaggtgcgagttcagtcacttggccatccccattcacagtataagcatggccatctaataagaccagttcgccagctaaaccgtgcgccgtcccgattccaaaattcccatgggttaataattcagcaacggtcattgtccctgtaaagagtcccggaattaatagggctaacgttccgtgttgataaacgcgtttgacatcatttgtcattgattttcctcctcaaattaaacgagttggtcaggtaataatgcttggcctaataattgattatctttgtaatcaacgggcacatctacaaggacgggaccatcaatggcaaaggcttgatccaatactttaccaagatctgcggctttttcgacccgtaacccggttgcaccaaaactctctgcatattggacaaaatcaacgggaccaaacttaacggccgctgattcgccatatttcatttcttcttggaattttaccatgtcataataaccgtcattccaaataatatgcacgatgtttaagttcagacgcaccgcagtttctaagtcttgacctgagaataagaagccaccatctcccgaaaccgacacaatttgtgtatttggccgcactagagcagcactgatcgcccatggcaatgccacacctaaggtctgcatcccgttactaaagagcaagtgccgtggttcgtaacttctaaaatgccgcgccatccagatgtaatgactaccaacatcgaccgtgacggtcatttcgtcggtgacccgtgcttgcagttctgaaataatgttcaacggatgactaagtggattattggtcgtcatttcaggtgccgtgtcacgttgattgagttctgcgtgcaattcaactaaataatcacgcacatcgcccgctagttgataccccttcatataaggtaataaaaagtctagggtctgcgcaatatcgccgaccaattctttttcaggttggaaattatgatcgatttcagcgcgcatatcatcaatcaccataatgtgcgcatcactttcagcgttccagttacgcggttcatattcgattggatcatagccgactgcaataacaagatcactgcgttttagaatgcggtcgcctggttgattccggaataaaccaactcgcccataaaaatcagtctctaaatcacgcgaaatgacaccggctgcttggaacgtttcaacgaccggaatgtgggtttcagccactaaattgcgaatcgctgctgtcacttctggtgaagaagcgcgcataccaactaaaagtactggtaattttgcttctttaatccgttgtgccaaaagcgtcgtttcaacgggactggctggccctaatttaggcgccattagcggtttaatcactttagaatgaacttctgagtccgtgacatcttgtgggatgctgacaaacgttgcgccctgtttagcggattcagcttcttgataggcgttagcaatcacttctgataaattctcaggttcttggacttccgcactgaattttgtgattggtgcgaataaagcggcattacgcatgctttgatgcgttagtcgcaacaaatcagcgcgtttcacttgaccggcaatggctaagactggatcaccttctgccgttgctgtcacgacccccgtcgctaaattactggcaccagggcctgaagtcgccattacaacgcctggtttgcccgtaatccgaccaatcccagccgccatgaaggctgcattttgttcatggcgcgtcaaaattaatttgggcgtctttggattaacgggatgttctagtcgttcaaaaacccgatcaatcttcgcacccggaatcccgaacacgtactcaacatcatgatttactaaactatcgatgatggcatccgcgccgtaatacttcttttcttcagtcatgacttaccctacctaacctatgattttataacttatatcttagcatggaactactggaaaaactagcagagtgcgtttagaacgcgttacccgcctacagccagtttactaaaaaaacgcactcaccatcttggtaagtgcgtttttttaatcattcattaacgaacagtaatttcataacttgcattaaacgtttcacctgcagccagttcgttgacaccaaatttttctgaaaattcaccgcttgcgtcaacggtatccgcaatcccccaccaaggttcaaggcacacaaggttgccttctgttggataaggtgaccaaacaccgatgaatggggcgccagccaatttcatggtcactgagtggtccgttttttcagaacgaatactgaattcattggcttgaccctttaattcgtagattaaggcgtcatttttaaataattggtgattgatatccgttgcgacgtcggttggtgctaacgtccggtcgttcaaattaatgaaggccccttgcaatgggatcttaacccgtgatttttgtgggcggtagtctaagaaataatcttcaaattgcgtgtcatccgttaatgggactttaaatcctggatgacccccaattgagaagtacattggcccgcttggcgcaacattgcggacgtcatagccaaccgtcaaatgcatatcatgaacacgatagctcacacgtaattcaaattcaaatggatacacggcccggctgtcagcgtctgctttcaacaagaaagtcacggcgtggtccgattgttcttcgatactgaattcgcgatcacgtgcaaaaccgtgttgacccatcggataggtttggccattatacgtatattggtccgcttttgaacgccccacgaatgggaataaaacgggtgcgtgccggccccaaacatcgggatcagcttgccataaatattcaagccccgaaacggcgcccttaatactttgtaattcggcgccttttggactgagggtcaccgttaaaaattcgtttgcaatttggatcatcttaaaataccaccttttaaaaattatagaataaagcgggttaaatctttatcggctgcaatattaccgatcttatcgttgacatattgttctgtgatggtgatatcccccatctgcatgtcaggaccttcaaagagaatatcctctaatagcttctctaagatggtggccaaacgacgcgcaccaatattatcggtatcatggttaacttggaaggcaatcgcagcaatgcggccgattgcttccatcgtgaaggtgacgtgcaccccatcggcgccaatcaacgccatgtattgttttacaagtgcgttgtttggttccgttaaaattcggatgaagtctttttcagttaaatcttcaagttcaacccggattgggaaccgtccttgtaattcagcgattaaatcgctgggttttgattcagcaaacgcccctgaaccgataaataagatatggtcggtcttcaaaacaccgtatttcgtattgacttgtgagccttcaacgattggtaaaatatcacgttgaaccccttcacgagagacttcaccagattgttttttgccaccagccgtaattttatcaatttcatcgataaaaataatcccggtattttcaacacgttggagcgcatcatggtaaatatcggcatggttgactaatttagcggattcttcttgaatgaaaacttcacgcacttctttaaccgttaccgtccgcgtaatttttttcttcggcataattgaacccagagtatcgtttaaatcaattcccatctggcccatcatatcgttcattggggcaacttttttcggttcatcaacttgaatttcgatttcccggtcatctaacaagcctttatctaactgttctttaacagataaccgttcgttacggatatcatccgtcacttcttctggttcagtttgtccgaaaccagctggtgtttcccctttttgaagcgcgttaaacatgttcattaaatcattcatgttgttattgttcttacgttgttcctttttaatgcccggtactagtagtttaaccaagcgcttgtctgcttgacgagcagccttagcacgaacgtttttaaattgttctgtttcttccatatgcacagccacatcagctaagtcgcggaccattgattcaacgtcacgtcccacataccccacttcggtaaatttagtggcttcaaccttgataaatggggcatcgacaactttcgctaaccgtcgggcaatttctgttttcccgaccccagttggcccgatcattaatagatttttaggcgtgatttcttgttgcatttttgcactgagttgcatccggcgataacggttgtatagtgcaaccgcaacggcttttttagcttgatcttggccaatgacaaattgatcaagttcggcaacgattgttttgggtgttttattcattaagtccattgtgcgacctcctaaaatgattcgacaatcacgttgtggttggtgtaaacatcgattccaccagcaatatcaacactggttgtgacgattttttcaacggataagtcatcttttccttcaagtaataatgcggtagctgctgcttgggcgaaattgccgcctgaacccacggcaatcacttgatcacctgattccgatagcgtatcaggggtgatgacttcaccattccctgaaattaataaaatatcagtcgcattgaccgcaatcaacatcgcttctaatttttgaagcgttggatctttacgccagtcttgcgctaaagcaacagcagcatgttgcaggtcgcctgaatacttttctaatttttgttcaaaccattcttgtagcgtaaaggcatctgcaacaccaccagcaaagccgattgcgacttgattaccataaattcgacggacctttttagcagaatccttcgtcacaaatttttcgcccatggtgacttgaccgtcaccggcgatagctgttttaccattatgtttaactgcacaaattgttgtcatatgaattactcctaacgttgtttggggattgggcggggcttaacgtgcttttcaaactaactttctgcgcttagcgctgtgaatcaaatcagcgactttatcgctaattcgcttccctgtgctagtgctcaaaagttgaacaagcttgaaagcacttacttttttcttaacgtgctttcatcaactgctttctacgctttgctacatctgtcatatcaccggcgttgccggtaatccgcctgattaggcaaatgctcaaaaacaacccgttgatgacgcacttctttcttaacgttcttttcaaaccatgttcttgcgtttagctacacaagtcaaacaattgcttccagtaatcattcgccttgttaggctaattctcagaacataaccggtttgaacgcacttctattttagcagtctttaagactgtgtgctaatattagtctatttttcgttgaaaaaaatcaaactttagtccgagttttacgcgcggggaaagaattggcggtaatctttttgtaaatgggctgtggtgacatgggtgtaaatctgtgtggttgataaactactgtggcctaataattcctgcaccgttcgcagatcagcaccgtgatccaataagtgagttgcaaaggtatgccgaatcatatgcggatgaatgtcactcgttaaacttgttttcttgataatctgatctaaaatgtattcaattccccgacttgtaattggcgctccgagatgattaacaaaaacgacatcgtggtccaattgttttttggccatcaattgaacacgaccaacttttaaataagcttgcaaggcacgttcagcatggtgcccgaatggtacatagcgatctttattgccctttccatgaacaagaatgacgcgtaagccgaaatcaatttgtgctaccgtcaactgcgcgcactcactcacccgcatccccgtcgcatacagtaattctaagatggcgcgattccgttgatcgagtggttgatccccatcaatggcagcaaatagcgcgtccatttccttttcgtaaaaaaaccgcggcagcttatgctgttgcttttttaattgaacagcttcaaaaggatcggtttgcacgaactcatttttcactaaataccggtaaaacgaccgcaaactcgaaattcgccgcgcgacagtttcacgactatattctttttgatccatttcattcaagtaagtctgcacgtccagtggcgtgacctgtttaaacgacgctaagccgccgttagcggttaaaaaagcactgaacatctgaatatcagcttgataagctttttgggtttctggcgagtaatgccgatcgaccactaagtactgtaaaaaaagattaagccattcttgttctaacgccaaaaaaatccctccaagcttgattagtattactttaccacaagcctggcgggatttaaaagattctaattaaagtgtcgtcttaaattggtcgatactttcaagtgcgcgatcagcaagtgcttggttccgttcctttttatcgcgaatccgttgtttcaaaggttcgaaaatcccaaagttcgcattcatcggttggaaatgtttggcactcgtatgggtaatatagtgcgccattgatcccatcgccgtatccgttgggaaaacagccggtgtttggtccaacgccagtttagcggcgttaatcccagccactagtccagaagcggcactttcaacgtagccttcaaccccagtcatttgaccagcgaagaatagatcgtcacgttgttttgattgataggttggtaataaaacatctggtgatttcatgaaagtattgcgatgcatcacaccataccgcacaaattcagcattttccaaaccaggaatcatgcggaaaacccgtttttgttcgccccacttcaaatgtgtttggaaaccaacaatgttgtacaaactagcagccgcattgtcttggcgcaattgcacaacggcgtatggttgtttgccagtattcggatcttccaatccaacgggtttcaaaggcccgaataacatcgtcttaatcccgcgtttggccatcacttcgattggcatacagccatcaaagaacttttcttcttcaaagtcatgcatttctgcaacttcagcgctaatcaaggctttgtagaagttttcgaattcttcttcagtcattggacagtttaagtaagcagcttcgcccttatcataccgtgatttgaggtaaactttatcgaaatcgatactgttcttatccaaaatgggcgctgcagcatcgtagaaatacaagccatcactgccgtttaaggcactgattttttcagctaagccttcggacgttaatggaccagtggccacaatcgtaggaccttctggaaaatcggttaattcttcatgatgaactgtgacacgttcatgattggctaagcgatccgtcaccgtttgtgaaaacggtgtgcggtcaacggccaatgcgccaccagcaggaacggcattttgatcagccgcactgatgattaatgagtccaagtgacgcatttcttctttaattaagccaaccgcattggtaatttggttcgcacggagcgaattcgtacacactaattctgcgaattgttctgtatggtgcgccggtgtcattttaacgggacgcatttcatagaggtgcacattcacaccgcgttgggcaatttgccatgctgcttctgaaccggctaatccggcaccaatcacgtttacaaaaggttctgtgctcatttgctagtctccatttttctaattatttttggacggtttcttcgtagtcaccgtttggacaaattacttgtttgccacctttaattttcttttcaacaaggtagtgttcacacttcggacagtttctgccgacgggtttatcccatgtgacaaaatcacaatctgggtaacgatcacaaccgtaaaataagcgattcttcttcgatttacgttcgatgacttgccccttaccacatttgggacaggtgacgccgatttccttcacgattgccttggtattgcgacaatctgggaagcgactgcaagcgaagaatttaccataacgacccattttaacaaccattggggcaccacagatgtcgcagtcaaagccagctggttcatctttaatttgtactttttcgatttgttcactcgctttttcgacttctttttcaaacggtttgaagaagttgtcaatcaccttgacccagtcttctttacccgtttcgacttcatccaaacgatgttccaaatcggccgtaaagtcgatgttaacgatgtccgggaagaattcgacaattaaaccattgacgatttcccctaactcagttggttcaaagcgttttgcgtttaacttcacgtaataacgccgttgaatcgtttcgatcgttggtgaatacgttgatggtcgaccaacaccgttttcttccaaagccttaactaaattggcttcagaataacgtgctggtggctgcgtaaaatgttgcgctggatcagttttaacgagtttcaccgcatccccaactgcaagttctggtaagacattatccttagcagagtcttcagtatcacgtgatgacacatagagtttcgtgaatcctgggaacttcatttgtgagccgtttgccttgaataagacatcaccttgagcaatcttaactgcgaccgtatcaaaaatggctggtgtcatctgactggcgacaaaccgtgaccagattaagttatagattttatattgatcgttagttaaaacgtctttcaagctcttaggtgtccgcatcactgacgttgggcgaatcgcttcatgggcatcttgtgcaccttcaggattcttcgtcttatgcgcctttaatgccgcatattcttcaccataattgtcatggatgaattgtgacgcttcatgtttagcaccggtagaaatccgggttgaatcggtacgcatataagtgattaacccgaccgtgccttctttgccaccaaggttaatcccttcatacaattgttgggcttgcatcattgttttccgcgttctgaagttcaacttacggttggcttcttgttgcaaggaactcgttgtaaatggtgcggctgcaaaacgtttgcgttcccgtttcttaacatcttcaatcgtgaaatccttagtcttatcgatttgtttcaaaatcgcttgaaccgcatcattatcgccaaggggtaatttcttacccttcacgccgtagaaactggcgttaaacttactgcgactctttttaaattccgcatccaatgaccagtattcttctggaacaaaggctttaatctcgttttcacgatcaatcacgagttttaacgcaacggattgaacccgaccagcactcaagccttttttaaccttttgccagagtaatggactgattgaatacccgacaatccgatcaagcacgcgtcgcgcttgttgtgcatcaacgagtttcatatcgatactacgtggatttttaaaagcacttttaacggtgtctttggtaatttcgttaaagacaacccggtttttttcagttggatcgagttttaaaatatgggaaacatgccatgcaatcgcttcgccttcgcgatccggatcggctgcgagatagatatgatcaacttttttagcttgcttttttaattctttaatcgtttcgcctttaccgcgaatcgagatatatttaggttcataattattttcaaaatcaacacccatttgactctttggtaaatcgcggatgtgacccttgcttgcaacaaccttatagttgcgcccaaggtacttttcaattgttttggcctttgcaggtgattctacaatgactaaatttttgcctgccatggacaaacccctttcaacagaacgctttgttcaaatcgttcattagcataaaacactaccttgacgattgtcaactgatagtatgcttgatattaacagcttaaagcatagcataggtttggcagtatgccaaagagaaattgttttcaaacgtacaaatcacaccaaaaatcggggttcaaccacttggtcgaaccccgatttcttctattatatagtcgccagataaaaaacttagactgacaaactatttttttgtgcatcgcgttcaagaatccccgcaataatttgatcaagggtgatggttgccatctccgcttccgcagctttttgcacctgatcataagccgcatcaagggttgcttgaatgttgctaccaattaaacaatctggatttgttttttcatcaacgtgtaataaccgttgatctgtatcaagcgcctgaaaaacggctaacattgtaatctgttccgctgggcgcgctaatttaggggcaatcgtccccggtttagtcgctaataaatccgccttcaccagtagtgacattagccgccgcactaaactaggattagactcgatgctcccagcaatcgcttggcttgataaatcaccatcttgaaaaatatcgacataggccaaaatatggatggcatcactaagtttatgagaatatttcatggttcaaccgcctttttgaaatcaattcaggcttatttaataatcgtctgtaacgcttcttttaatgaaggtaatggtcggcctaagacatcgggtaaatcagaagtggtttcatctaaatcaccatcttgaatcattgtttgaataccagtgacaatttcagcgacttcagcaggtaagccgttgtcttcgaggctttgacgataatcagccgcatctaatgatactaccttaaattcttgattagtcaactcgctaatcgcttgagctaaatccgcataagtggctggcgcaccggaaaattcataaatcgcttttggttgatcgttgactaataccttagccgcagcttcagcatagtcgtgttcgagtgcccaaccaacatgcccttcaccagcgccataaacaaatggttgacctgctaatgcgcctttaatgctatccatttcgttttcaagataccagttattgcgtaagaatgtatgatcaatgcctgatgctgccaatgctttttcagtttgaatgtgatcacttgctaaagcacctgttgcttgatcagcgtgtgggaaactcgtataagcaatccacttaacgccagcctttttagcagcttcaatcacgtttaaatgttgttgcgcacggggcacatcgccaccaggttgtgaggagatgaataataaccggtcaacgcctttgagtgattccgttaatgtggcaacatcgttatagtcaccgggacgaacggtcacaccagctgggaccattttagtggctttttcagtattccgtgctaatccaatgatttgttctgctggcactaagtcagccaacgtcttcattgcgacttgcccaaaacgacctgtcactgctgtaattgcatatttcatattaaaaatcccctttgaattccatttgttactttataagtaacttgtgactttaatattaacaacatgccgcagaattgtcaacaattaaccctcaatcaaaataatgcaactcgtccaataacaattgttgatttaaaagcggtgttgcaccggctaaaatcagttgattacagcctgccgataatgaatgattaacctggcccggtaaggcatatacgttacgattggcttgtaatgctaaattagcggtgattaagctaccacttttttggcgggcttctgtgaccactaaactatgacaaagtccggcaataatccgatttcgggctgggaagtggtgcttcttagccgttacgtccaaaccgtattctgatatcaataaccctttttcagcgaccgcctgttgcaagtgttcgttttgtggtgggtaataacaattcaagcccgttccaatcacgccaatcggtcgtaaccctttttggagtgcaacttcatgcgccatcgcatccgccccttgagctaaaccactgataatcgtcgttgtttgtggtaatcccaataaatgctgcagggcttgcttagtatactccgtggcttgccgcgcaccaaccaccgcaacacatggctgtttcaaaacacttaaatcgccgcgataaaataaaactgttggcggacaatgggtttctaacaaccgttgcggataatctgcttctagaatcgtcagatactgaacataacgttcatgcgtggcacacttctgttgcagagctagactgtcaaaactagtctgaaaggtcagccaatatcgctccggtaaacacgcaatctgcgcaatctccaatgccgataaagcccaattgtgactcgttactaaccatgcggctaagcgtaattcactgatggggccaaacccatctgccaggtgtactttcaataataattgctttttagtcaacacaaaaaaacagctcctttacgtttatcttcgtaaaggagctgttttattttctatagggcgtctttaacgggcgaaaaactgcggcggtgaattggcgtaacaccgaattcagctaaaccagcgagatgtttcgctgtcccgtaacccatattattagcaagatcgtaacccggatactgttgatcataattaatcatcaattgatcccgaatcactttagccacaatactggctgaggcgatactaatactgcgcgcatcccccttaatcaatttttcttgtgggatgtctgtcggcacggtcattgcgtccaccaataggtaatcggggtgttctgctaaactagcgacagcttcgcccatcgccagttccgtagcgtgatagatattctcttggtcgatccgtggtgcatcggcaatcccaatgctgacactgatggcttgtgccatgataccgcgatacagttcttgtttcaccttaaacgaaagctgtttagagtcgttgacttgccataggtcaaaatcatgtggcaaaatgacggccgctgtcacaactggacccgctaatgggccgcgcccaacttcatcaattccagcaatcaagggataatctggccataaactttcttctagctggcgtcgttcgataaacgccgctttttgcgccgctaacttagccatccgcttgtcatattgaacgagtaacttctgcacgccagcacgcgcatcactgcgtaagagcgccacttcttcctctgaaatgtcgtctaataagcgtgccttaatggcagcaattgattctggtttggtcattagtgcgcctccacaggaacgatatcgagtgtaaagcgccctaacttacccttacgcgcgtccgtgatgaatttcatacagaagcgatcgtagtcttctttaaaacctagtcgtttggtcaatgccatgattaaatcaggcgctggcatttcaagttcagccggcgtcacatggtattcttttaccaattgttgcggatagaaatccttgaaataatcgagggcatacaccacaacatcatccgggtgataaattgcatccgaaatcgaaccagttaaggccaacttattgccgacagctggatcttcgaatttaggccataaaacccctggtgtatctaacaattcgagtgattggcccgcttttaaccattgttgattcttggttacaccgggtcgattacctgttaccgcaatgtttttttgcaccaagcgattcaaaatcgttgatttaccaacgttaggaaccccaacacacattgcacggatcaccggattaagaatcccttttgcccgttttttagcaagtttgtctgccaaaatttcttgtgctactttttcgatttgcggtaattttgatttatgttgcgcatcaagcgcgattgctgtaatcccccgttttttaaatgtttcaatccattgttgtgtgcgtttggcatctgccatatccgctttgttcataatcaagagcgtcggtttgttttgaccaagttctgcaatcatcggattaatggaagattctggaacccgtgcatccacaatttcgagaatcaaatcgactgctttgagccgttctttaatttgtttttgggcctttgccatatggcctggataccattgaattgtcataataactcctttattgctagttaagcgatatacatcattcttaatatttgtcactgattgtattattcttaattctatcatacctgatgtctggctgacgggttaaatttaattccggactacaacatccaccaattaagcgtatcattttttcagttaagcatcatattcagtacatttcatacgatcattagcactcgataatcaaaaaagctgacacactctagagtatgtcagcttttaattattattttaaagattgtatatctttaatcggccagtagaccgccactgctcggcctaatattgtatcgcggtggatcgtaccaaacaaacggctatctttgctgatctggcgattgtcacccaatacaaagtactcatcttttggaatctgcttttcgccgattaaggtttttaattcaaaatctgatgttaaaatccctggtttctttttggcctgattcaagaatggttcgtcgacatgccgtccattgatgtacagctggtcattgcggtatgcaacggtttcacctggcagaccaatcacccgtttcacataagttgtttgatcagctcgggtgaagacaacaacatcaaagcgcttgatgggcccactagtgcgtaataagagttggtccgctgactcaagcgtcggggccatcgattgccctgacaccgatgcggggaccagaatgaacgaccgtaacacaatcgctaccgtcccagccagtaaaaatgcgagaagccaatagccggtaatggcccatccccgccacaatttctgcttcggggaagtcattaggcttgttcgctttcctgataggcttcatacgcctcatcaaaaatcgtcatactcgggaggtagctgccattaagttccaaatagcgcgttaatgtttcataatcgccgctttgtttagggaaagattggtcaaaaaaggcattgttggcaaattggggaactggttcataattattcggatcacgttgggtcatgaggtaacgataaaaactctgcttcatctgaacaccttatttcttattttttagcgggatatagacgtttaaatcaatcttatcattcttcaaatcgatatgtttagcagttacttgcatcccgttttcgagcttgaactcatttaggcgtaatgtaatccggctcttgtgtgcatccaaaataacccatttggggaatttgtattgacgcttgatgtaattaaagacaaacgacatgggcaccttcaattgtccgactgctaattgtttggcgcgtaattggacgtcgccattttctaaaacgtacggttcaaaaaagaggttgaattcgaccggaaaccctaagaacttgaattgaccagataaaatcgcctgctgatccagggtgagttggtatttaatctttgaatcttccaagtagttttgtaaataataggtgactaaactattgatttgtctcttatgcatctgaatttcaaaagtgctatcagctttgatgattttctcagttttaatcatttcagtcttaggggctgtcacgttgtagccgacaagaccaactgtcccgatcacgactgctaataagacgatgaaactgtatttccaataattgatggtccgtttagttgttgttttctgtgctgcttgatgtgcttgtctggttgtcataacctatcctttctctaatcccacgtttgcttgtgtgctttcatcacttgccaaaaggcctttgtgacccattgataacctttatgattgggatggaaatgatcatctggactgatataggggttcaaatgctcgttagccgctaatgttttttgcaactgtgcactatccattttagcgagcgatttagtctgtttgacaaaatgcccatcgccccgtgtcaacatccgatcactattgacataatacgtatctttgaaatcattagcaaccgttttggcggtctgattccactcagcaaccgcctttgacatcccagtgatttcagggaaatagacataaaacggattgtagacccccatgatgaaaattggggcatcaggattatattttctaatttgcatcatcagcgtggttaaattcgcttgatatttttgctgaccagtcgtaatccgacgttgattcagctcaaaaaaattattctgtaaaactgccattaggtcgttgcccccaacagttagcgtcacaatatcagcttttgccaattgctgctgtagcggcttttgtttctgcacgcgtttagtaatctgtacactggtatcgcccgtcacaccgaaattggcggtcttgacgggatgcttggttgcttgctgaatctgattggcaactaatgacacatagccttctttgttggtctcatcaccaacaccatgcgtcaatgaatcgccaatcgcaaccaactgcaacgtcttttttggttttggttttgatttgatcactttatccgctgaagacgttgatgttaccgtcttaggcgcttggttgggccgtggcgttaatagttgccagataataaagaccactaaaatcgcaccagcaaataagcctaaatcaattaaaatctgtcgtgctttcttcaaacgtgacacctcggttatttctagataatagttaaggctgggacaattaaatgtcaaccagccttagtgtgttaatgcattaattgtaatcttgttaatcctctgtgtagtacataacggcaaatgcgcctgcacccgcatgcgttgcaatcactggatcagttgtccggacaagaatttcgatgtttgggaatactacttgcaattgtgctttaattttttcgctcaattctagcccatccgcatgtgaaatcccgattgcccgaatctttaagtcgcgcatatcagcttccatttcatcgatgaatttcgtaatggtcttcatcccccggcctttgcgtaacacttttaattcgctatcagccacttcaaggatcaccttgatatttaataaacttgaaatcacaccagccgcatgactcaaccggccccccttaacgaggttggttagatcagtcacacccatgtataacttcgtatgatcgtgtacgttttgaatggctgctaaagcatcatccatgctaccgccgttttcaatgacttctgccgcttttaacacttggaatgccattgcacggtcggtaaagtcgctatcgacaactgttacatctgctttcgccatctcgccggcttggcgggctgtatcaacagtgccactaattgctcgtagcatgtgaattgataaaatctggctgccatcagccgctaattgttcatacgtttcgacaaaattcccgattgcgggttgactcgtcttaggtaaggcactcgcacttgccatttcagtcataaattgatcgcgggtaatggtttcaccatcgatatacaccgtattgtcaatcataatcgtcaacggaataaccgtaatatgatgttctttaatttcttcaggagtgagttggatggatgaatccgttacaattttaatattagccactattacttcagccacgctttctatcttgaaatctgggcaatcaacggccccgtgatttctatgattatgtctattgacagtatatcaaacaatcacgcttttttcaccaaaagttactgattaaaaaaaaagccagttgtcacttttgtagcaagcaaaaaggcggttacatcgctgcgaccgcccttaattgaatctttctaacggcgttgatagatttcaaacgtatgcgcatagcgattacgttcgtccaccacaccaggtgtttgactgatcaattcgaactgatccatcgctaattttggcatataaacgttgccttcaaacgattcagcaatttttgtaacgtacagataatcgacatcatcggcgtacattgcaaaaatatcggcaccaccaatgataaaaatctttttcatcgggttggcttgctcatatttaagcagttccgctttggtgtgcatcacaaacaccccatcagccacagctaaatccggttgtcgcgtaatcacaatgttttggcgtccaggtaagggttggacgggtaaactatcatacgttttccggcccattaccaccacttcatgaaccgtttcgtgtttaaaattggcaagatcgttgggtaatgaccatggtaagtgaccattttgaccgattaacccattttgatcttcagcccataagaatgctaacattggcgctcctcctcattaaaccgcaacgggtgctttaattgcgggttctgcttcatagttttcaagtttaatatcggcgacatcaaaatcaaagatgcttgttttatctggattgagccacaattttggtgcggcatgaattgggcgttcaagctgtgtcttcacctgttcaatatgattactgtaaatatgggcatcacccaacgtatggatgaattcaccgacttcaaggccggtttcatgcgcaatcaaatgtgtcaataatgcgtagctcgcaatgttaaatggtacgccaaggaaaacatccccgctacgttgatacaattggcacgataaccgtccgtcattaacgtagaactggaacatcgtatgacaaggcggcaacgccatacttggcacgtcttctggattccaagctgagacaattaagcgccgtgaatcgggattggttttaatttgttcaatcacatttttaatctgatcgattgtgtccccagaacgggtttgccaagcacgccattgtttaccatagatatcgcccagttcaccatattgtttggcaaaggcttcatcgtctaaaatccgttcgttaaactgttgcatttggtcgcgataaacagtattgaaggccgcatcagtttgggcacgatgaccaaaatctgtcatatccgggcctgtgtaatcggcactttgaacgtaacgttcaaacgcccattcatcccaaatatgattattgtgttgtagtaagtaacgaatattggaatcaccttttaaaaaccacaataactcacttttaattaacccgaatggcacttttttggtggttaataaaggaaacccttcgtttaaatcaaagcgcatttgatagccaaacagactataggtgccagtgttggtacgatcttctttatagtgacccgtttctaaaatggtacgtgctaaatctaagtaggtttgctcagacatgatgtggattcctttctttaacgtgcttttcaagctaactttctgcacttagcgacgtatgccaaataatcgactttgtcgcttattcgtcacactaagctaatgcttaaaagttgaacaagcttgaacgcacttcttttaacgtgctttttgaaactggcgcttgcgcttaacgacatttgtcaaatcagcgattacatcgctaattcgccaaattaagttaatgctcagcgtcaaaccgtttcaaacgcactcagttttttaacgtgcttttaaaaccatgttcttgcgtttagctacacaagtcaaacgattgctttcagcaatcattcgccttgttaggctagtgctcggaatatacccggtttgaacgcactcatttagtttgcgtattcacttaagtattcccagcgggtcattttttcgtctagttgttggttaagttgatccatttgggcctgccactctgctaatttaccatagtccgcgccgtttgcgttcatttctgctttgatggtttcaatctgttcgtccaattgttccatgtcggcttcgatgtgttcgtattccttttgttcggcgtatgttaatttctgcttggtctttgcaactggtgcttcttcaaccgatgctgtcgctgctttaggcgctgacttagttggtgttgctttttgttttgccaagtaatcgctgaacaggccaacttcggtgctaatcttgccggccccttcaaaaatcaagagtttgtcggcaacttgatcgaggaagtaacggtcatgcgaaactgtgatcacagtcccgttaaagttttccaagtaattttccagaatcgtcaacgtgccaatatctaaatcgttagttggttcatccagtaataagacgtttggttgttgcatcaaaattttcaacaagtacaagcggcgtttttcaccaccagaaagtttgccaatcaatgtgccgtgcatttgacggctgaataggaattgttctaacaattgtgtgacactgatccggtccccatttttaccaatgacttcttcgccggcttcttgcaagtatgcaatcactcgtttgttaggatctaagtcttcattttgttgcgtatagtagccgaggttgacggtttcgccgacaattaactcgccactatcaagtgggaggcgttcagccaacacgtttaacagtgatgatttaccggccccgttgacgccactaatcccaatccgatcattcgcttgaactagaatactaaagtcatccaaaatctgacgatcgccgagttttaaactggcgttctttaattcgagtacttttttacctaaccgcgattgccccatctgaatatcgacttccgaatcgtctggtccagtggttaaattcgcctttaagtcattgaagcgattaatccgcgcttgttgcttggttgttcgtgccttagcacccgcgcgcatccacgttaattcttgcttgtagagttgttgttgcttatgggcagcttgttgttcacgttccaagcgatcagctttttgggttaaaaattgttcatagttaccgttatatgaatagagttgaccaccgtcgagttcaaaaatttggttcgcaacacgatccaagaagtagcgatcatgcgtgacaattaaaagcgcgccttgatattgtgctaagcgtttttcaagccattcaatggaatcaaaatccaagtggttcgttggttcgtccaaaatcaataagtctgggctttcaattaaggcttgtgccaacccaacccgtttttgttggcccccagataatgtattaatcggttgatccaaatccgttagatgtaattgcgtcaaaatcgtcttgatatccgtatcaaccgtccaagcatcttgttgcgtcatttgcgcatcagcttgttcgtattgcgtctgtaacttcggattagtgggatcttgcgtatatgccgccaagacgcgttcatagttttgaatcgtcttgaaaaccggattatcgccggcaaaaatcgccgccataatacttaagttcgtatcaaagcttggtttctgggctaaataactcatcgcgtattggttaggcgtttcaacctgcccgctatcgtatgaatccatgccggtaatcgcgttgagtaacgtcgttttcccggtcccattaatgccgactaaaccaatgcggtccccttcacggattaaaaatgaaatgtcttcaaaaagcgttttttcgccgtaagtcttcgttaaatgcgttgctgtcaatgtttgcaatatagtcacctttttactttcgttaccatcaatcatagcgaataatcagacgactgacaatcaaaatgacaaaaagaatgtcgtaaactgtaaacaaataaaaaagcccctgacaacgatcaatattgtcaggagctaacgtttaaatttcagggtacatatctgcaattgtgtgttctgcatcaatcacaatgtacaaccgaccatttttttgtgagatttggctactttgataaatattatctaagccactattatctttattcttgaatgggaaataaatttgcattggtgcgcgatcttgatcatcttcaaagattaaatcgagtttttcgatgtcttgatacttcgttgcacgaccgaacatccccatttcaagagaaccggtgttgatgtcttcggacttcacatgatccgcttcaggtaagatttcggctttgaaactcttgcaagggtgaatctcttgcattgggccaccattaatgcgaccataactggtggtaacacggctaatccaaatatcatttaattctttgtggctgacggtccaagcgtcaccatttctaaaataaaatttcaattccttaaaaacatgttgtgtcatcaattgtcaccctttccgaatgtgcttacatggttattttaacacaccttctgagggaatggcttagttttgtgcagccgattgcaataattgggcttgatcgtttggtaattgatctaacaccacggctttttcgagttgcgccaacatttttcctagttgcggaccaggttgatacccattttgcattaagacttgtccattgatggcgagttccgccttttgcttgatttgcagtgccgcatactttgcttgccactgatcaactgcgactgattcgttggtcattaattgggcaacaattaacgtgatgtctaatacatgttgccccgcttgataaagggcccactgatcggctgattggtctagaatggctggcaataatcccaaacctgctttaaccgcatcgatcacatcgttagcactcttccagcgtttcaataatttgccggcggcggcgggggttttacccaataatgcattgactagtagccaagccgtatcttcatcatgaatctgttgcgctggtaatgccgctaatttggtcagtcccgctgcttcagtcgcgaacgctggacaatattgatacaacccggtttttaaaaaggtttgtaacccattttgccgctgaatcccttgtagcaacttcacaaattcgacatgaatgcgttccaccgcaattttcgttaatagttcagcatgtttggcaatcgcagtttgtgtttctggtgtaactgcaaagccgagttgactttcaaaacggacggcacgcatcatacggagtgcatcttcgtggaaacgttcgtcggctttgcccaccgctctgatttgttgcgcttttagatcggtcaggccatcgaataaatcaataatttcaccatcagcgcgcatcgcaagcgcattaatcgtgaaatcccgccgttgtaaatcttcggctaacgaccgcacaaacgtcactgaatcaggccgtctaaaatcttgatagccactttccgttctaaaagtggtcacttcatagccagtcccatgatcaagaatcatcacagtcccgtgctggattccggtatcgaccgttcgtttaaaaatttgcttcacttctgctggatacgccgacgttgcgatatcaacgtcgtgaatcggcaagcctaataaataatcgcggacactgccgccgacgaaataggcttcaaaacccgccgcttcaatttgttttaagattggtagggccgcttcaaattccggcgcaaaggtggttactttcatggctatccctcttatctaacaattaactgtttctgatgctatttatcataccacaatcaaggaccccacttcagccaccaaagtggttccaactgtttttaacccccattccgtgctatatttaagttatgtaaagggggcgttgacatgacgaaacaacatacttggcaaacgactagtcgtgatttagcggtgattgcgctgggctgtgcgatctacgcgtttgggctagtgaccatcaacattcaaaatcacctggctgaaggtggcttaaccgggattaccttgattttacggtattggttgcatatcgacccggcgtattcaacggctttgttaaatatcccgctaattattctaggctatcgttacctcggtaaacgcgcactcgcctacacgatttacggaacggcgatgatgtccgtttttctatggatttggcaacgtgtccccatcacaattgatttaaaccacgatattttaatcgccgctattctagccggtttatgtggtggcttcggcagtgggattatctaccgcttcggtggcacaactggtggcaccgacgtcattgcccgcattatcgaaaaagaaaaagggatgccaatgggccgctccctccttctttttgacgtcgtagtcttaacactctcactcagttacctcgatatcgaacatatgatgtataccttaattgcgtcttacgtcttctcccggattgtgaacttcacactcgagggtgcttacgccgccaaagggctactcgtaatcagtgaccacgcgcaagcaattgccgatgacattctggccgatatggaacgcggcgtgacgtttctacaggccacaggcgcttatgcccatcaagaccgaccaatgctgtactgtgtcgtcagtccaagtgaaatcgcctatcttaaacggttgattaaccaacatgacccgcacgcattcgtttccattattgatgtgcacgaagcactcggggaaggctttacgtacgactaatcaataaaaacgccagcgattaatcgctggcgtttttaagtgtctttatgataattcctgtccctcagttaactcaatttctttttcaacttcttcaaccatcacaaaatatttttgattgcgcagaacaaagaaaatcccaattaaaatcattaagctcgcaaaataaaaagtccaatgcgctgaccatttctcagcgattttaccagcaacaaatggtgcgattgccccgccagtaaagcgaataaagctatacgccgatgatgcaacactgcgttcaatcgaatcattttccatcgcaaccgtcgttaacaacgtattcaccaagccttggaagaaaccagcaatgatgacgccaaaggccactaaggctggttgatctgcataaataccgatcaccattaagcagatcaagaaaaagcttaacccaaacaacaacgtcacaagggtattcgttttttgttccatccgtggtgcaatgaaaaccgatgcaatggctaacatcacgccccacccgaaaaagacaaaaccaacttgcaattcagttaacccaactaataagaatggtgcatacgctaaaatcgtgaaaaacccgaaattatacaataatgcaataatcccgattgaacgtaaacgatgattttttaacgcgacagcccctgcaaaaaaaggcgcccttttagcaggtttagcaatcggttctaatgaaaccatgatggtcaacgccgcaataaacatcaaaatggcgacaccataaaacggaaaacgccatgaaagactccctaagacgccacccacaagtggtccaacggccatcccaattcctaaagatccttcgtataacataatcgcttgttccgttttttcaggcatcacactgacaatcgcagtcaaagcggttgataggaacaaggcgttcccaaagccccaaccggcccgtagcgaaattaattgcgtaatggtctgtgaacgaccagctaacgccgcaaataaaacaataatgatcaaaccaatactaatcgtttttttcgcaccaattctagtggaaataaaccctgtaaatagcataataatccctgtgaccaacatataactcgtaaatagtaaggtcgtttgcgctggtgtggcatttaatttaaccgcaatcgtttttaaaatgggatcaactaaaccaatccccataaatgcaaccatacacgtaaatgcaacggcatacgccgagcgtagccctttattttgattctccagcaacatatcactctctttctctttatataaactacattagattgcaaaacatatcaatttttacattaaaatttgacataatatagtgacatgtttgttgactctaaatatggtatactgagcaataattaatcgattaaagggtgaaataatatgagtacgcttagctatattttattatgtatgttagttcgcaaaccgtgtagcggctacgaattaaagcagtacattaatttattttgggaagcacaccacagtcaaatctacacggcattaaataaactgcacgaacaaggctatgtcacggttaaaattgatcccgttcataaacaaaagaagatttatcatttaacagaagccggccaactcgtcgttactgactggtttcaagaagaaacgaatttacccacacaacgtgacgagtttttagcaaaagtttacgttatttcactgttcaatcaagaacaagcagctgacttactccaagatcgccgccatcattaccaaaaaattcaaaaacaataccaacataagatgcaagaatacaacctcataaccgatcccaccgaaaagcaaaaaaacttaggtcgttacctgattttgaaacggcgcttaatggtctgcgcaacagaattagaatggtgcgcgtgggcgcaggacattcttaaccgcaatcaaaaccaataaaaaagacagctaatgcacttaaaaatgcactagctgtcttttttatgctttagttaaacatttcccacaataaacacgagctaaattaactatcgttagcaggcaaagcatactaacggccattaaaaacggtccagcgagcaaagccgccattgagatgggtgcttggtacaaaatggttcgcccgacatgaatcgtcaggctccaaactaagcccccggctagtaggctgactgcaagacaaacaccaactaagatcactgcatgcgattgttgtgtcagcaatagttgctgttttgttaaaccgagcaactgtaattggcgcatttgctgggcattatcctcttttgcgactaacagcgtcgccaatacattcgctaatacaatcagtaacggcgcgcccaaatataaaccaattgtcaaaatgaaattcaccaaacgttcattgttggcactcgtggtatttgtataggccggtatattccacataattgccgacatccccgtaattaaaaccgcaatgaccgtcactggcgtatacaacggcaaatatttttcagcagtatagtcaatatcatgggctgccatgttcaaaaagagcgttctagcacctaaccaatagagcacgtggctaattaattttaataccgtgtgtccggtaagcgcaattagaattaataataagaacaacacgagattcaggttgccaaccgaattgccgagactgccaattgctttctcggaatgaccgacataggttaacgccatgctttgcatcgttagtttaataattaacccactgacgaccattaacgaaacaatcgtcctaactctacgaacgatccgccgtcggtgactgagatgcttattcccatcttttagttgatggcgtgcatgccaaaaaccaccactaccggcaattagactaaccaagacaaccgttaacaaaagtgccaagaacgaaaaatgaattggcatattcggcaacatttggggcccaacaatctgctgcaaccacgcataacaaaaacgcgttagtggcaaggcaacgactccgccgagcagagcactcaccccactgacaattccgatttaaatccccaaaatagcggccagtgcattgatcgttgcccctagaatcgcaagcattcgatagtccgttttaaactgatccaaaagctggtgcacgattcctttaatcacgattaccattgtaataccaccaaaaaataccggcatgataaaaatcggcaacggtgtattcggaccgtatagatcaacttgctgcgactgtgccacattcacaattcccgttaaacaaaaaccgaggattaaacccactgttacaaaaactggtattgttgctagccattgccgccaggaatgctttaactgtaaccaactgattgtccacatcgcttacaccacctgatccaaggcggcatagattgtcgcaagtgtcggttcagtcacaatttgctgaacctgaccgtcttttaatacaatcgcacgatctgtctgactagccagctcaatatcgtgggtcaccataatcaccgttctccctttagcaaccatctctttgaaatatgtaaaaataatcgctttggatgccgaatctagcgcacccgttggctcatcggcaaatagcacatcacaatcagttagaatcgtgcgagcaatcgcgactttttgttgctcaccacccgataaagtcgcaacaggcccatcgatttgtcccgcaaagttcattttggtcagtaactgtttaatctcagcacgttgcggttgctgatgactcaagcgctgttgtaagacaacattttcaaagacgggtaaagactgaatcaagttgtattgttgaaaaataaagccaatcgtctgtctgcgaaaagccgctagttgattgggtttcaattgatacggattaatccccgcaattgccacagtgccgcctgtaggtcgcgtaatccctgaaatacaatacaacaacgtactcttaccagacccagaaggcccaacaatactgaccaactcccctttttgcaccgtaaacgaaatatttttcaataaggttgtcgtctggtcagactgcccaattgacaccacttgtgttagttgggcaaccgaaagtattgtgtttgtcatcctaaaaacctccccaaataaatcctgttcccgattcctcttcaatgtaccactttcatctggggaagaaacgcgactaaagacgcaaaaaaacgctcgactaaagtaatagtcgggcgtttttttgcattattgcatggcttggtaatcgtcatagagagtttgcatctctaaatcgtttggcacgagcttcaaatattgtttgagggccgctaacatttctgggacctgtgccatttcttggaagaataaaattaaatcgtgtagaaagtccgagttatctttcaagtcaggataagctaacagataattttcgcgcgcttggtcaacatcatccaccgccatctgtgattgcgccaatgaccaatataaatcagccgttggtttatgattttcaatcgcatcttgtaagaaagcaatgttttcggcatggcggccttgacggcgataaacttggctcaaggcactaatttcgcccatattatcaggatcaatcttgagggcctcgtttagcatctgttcagcaacctcgttattgcctaattgaagcgctagatcgctccccttttgatagaggacctcgttgtaggcatcgtacccaattccggtctgaacggtcgttaaggcgtcttctaattgattctgagcctcttgagctgctgccaagtaagtatatagtgacgtatattgtggatcagtcgtctgtaacttggttaagatttcaattgctttttgataatccttaatttgtaagtacaaaaagcccatctggaattgatcgtcttctgttagaaattctggcgtcaacccttcgtaaatctgcaaagcttcttcaaaagccccactgctggcataactagttgccaaccgcttttgaatattcacctgtcccagttcaacaacgtcttggtcgatgagcgtctcatagtaattggcggccttcacatattcacccatttcaaagtacaattcagctaatgcgaattgcatgacgggttcatctggatataggcgcaacgccgtcaataatttttgttcactaacttctggtaagcccattgtttgatagacatcagctgccgtcagcagactttcggcgtacgcattggattctggcgtaatatctgccaacaagttcaaggcgtcgtcgtattggccattgctgaccgcaatatctgctagtgttgttctgatttgatcttcttcaggaaattgggccaacaattgttggtaaattgtcgttgcttgttccaaaaaacccatcgcatataactcttcagctaagctgtagagcgtatcgggttcatcagcaactaaggcttgttggaagtaagtctgtgcttgttctaaattattatcttctaatgctgtaagcatttgttctgaattcgtcatttaaccaccctttttcgattgttccattttaacatattcggattaattgccaataaaaaaagactgggaaaaatcccagcctataaattgaattcttatttaacagaatcctttaatgctttacctggcttgaatgcaggtactttgcttgcaggaatcttaatttctgcaccagtttgtgggttacggcccttacgagctgcacgttcacgtacttcaaaagtaccaaagccgattagttgaactttgtcaccttttttcaaagtgtcttggattgaaccaaatactgcatcaactgcagcagttgcatccttcttagttaaaccagtctttgatgctacgccttcgatcaattgtgctttgtttgccatgtttttcacctcctgctcatcacagataatcagtaattaattaccgaaaccatttttgagtggtcaaaaatgacgaaacaatgatttgatcaccatttcattttttaatttatcacacaaacctagtgatagcaaggaatttcgctaaaaaacagcattctgagcaaattagttaatcatattagcggatttttgaaaaaacagcttattttcgttgacgagggatcaaatggattggtgtaccagtaaagtcaaaggttttccgtaattgattcttcaagaaacgttgatatgagaaatgaagcaagttaacatcgtttacgaagaccacaaatgtaggcggttgaaccgctacttgtgtcatgtaataaatgcgcaatcgtttcccattaatagctggagttggtgtcaccgttgttgcgtccatcaagacttcgtttaagagtgctgattggatgcgccggttttggttttcactcacttgttcaatcatcgctggcaagttttgcaagcgaacgccggtcttagccgatacaaagatgattggcgcatagtctaagtattggaattgatcgcgcacgtgattttcgaactctttcatcgtgtggttgtcttttttaagtgtatcccacttattaaccacgatgataatcccacgaccagcttcatgtgcgtagccagccactttcttatcttgttcacgaataccttcttcagcattcaaaacgactaatacgacgtctgaacggtcaatcgcacgtaatgcacgcattacggcgtatttttcagtattttcgtagaccttaccccgtttacggatcccggcagtatcaatcatggtaaattcttgattatcttcagccgtgaacttcgtatcgatggcatcccgcgtagtcccttcaatttgagagacaattacccggtcttcttttaacatcgcgttcacaagtgatgacttcccaacattgggacggccaatcaaactaaacttgatgctatcgtcttcttcttcgtcatcttcagctgggaacttagcaacggcggcatctaaaagatcacctaacccttgaccatgagcccctgaaacggcgatgggttcgccaaagccaagactatagaaatcaaaaatatcttggcgttgttctggattatccgccttattaaccccaagtaagatcggtttgtcagcgcggtataaaatttgtgcaactcgctcatccgcatcagtaaccccttctcgtgcactcactaagaagataatcacgtctgcttcatcaattgcaatttctgcttgttgtttaatctgttccataaatggtgcgtcactaatttcaatcccaccggtatcgattaggctaaattcatgccctaaccattcacttgtggtataaatgcgatcacgcgtaacccctggcgtatcttcaacaatcgagatccgctcaccggcaatgcgattaaaaatcgtcgatttaccgacattaggtcgaccaacaatggcgataactggttttgtcattgtattcattcccttcgttgttcagtgtaccctgtctgagccaaactgacaaggtcactccgacaaagtccgctgaacttccgcttcctctgcgtcgtactaatcaatcaccgacataaacgtagggtctgggacaaaacctagttttgtcccagaccctacctttttgcatataacttttaaaaaaattatttatcgtctaatgttttaccaagcatgtcgccgatactgaaacctgtttcttcttctggcatcacatagtcagaaggcgccacatctttgtgttctgaatccttagcaccagcaggtttttcttgcaatgctttgattgataaacctaaacgttgttgttcaggatcaactgataagaccttgacttgaaccgtttggccttcttctagcacatcgtttggtgtggcgatatgttgatgtgagatttgtgaaatatgcactaaaccttcaaccccagggaagacttcaacaaaggcgccaaatgttgttaaacgtttaacgaccccttctaaagtgctaccaactggtgctttatcagcgatatcatcccaaggaccaggttgcgtatctttaattgataatgagatccggcctttttcttggtctaagctcaagactttcacttgcactttttgaccaacttctaagacatcagaaggttggttaatgtgatcatatgaaatttcagaaacgtggactaagccgtcaacgccacctaaatcgatgaatgcgccaaagtttgtcaaacgagcaacttcaccttcaacaacatccccaggtaacattttttcaaaaactgcttgtaacttagcttgacgttcttgttccaataatgctttacgtgaaagaattaaacggttttcacttggttcaatttcaataatttgtaaggttaattcttggcctttaaagctgcttaaatcacgtacgaaacgatcagaaatcattgaagctggtacgaagccacggacaccagcatcgacgactaagccgcctttaaccacgtcgatgactttagctgtgattgtttcttgattagcaaatttttgttcaatttcagaccaaactttacgggcttctaagcgacgtttagataataagtagctcccgttttctttatcgttaccgattcttgaaatgaccactaaatctaattggtcgcctactttggcaacgtctgcgatgtcttcaataggttgacttgataattctttttgaggcacaaccccttcaacaccagttccttcgatgccgacaatcacttgtcgatcttcaattgctaaaacttcacctttaacaacgtccccaattttgacttcgtggacactgtctaaagcagctgccattgcatcgctgctttgggtgttattcaaattagcttcactcatagctaaaatcctccttaacgactatctatacagttactattttagttgatatctattcggattaccagttattttacctcgttcaaagataaaattacatatttttctttacaattgctaatattgtgtcgaccacctcatcgattgttaactgagttgtatcgatttcaatggcgtcgtcagctttttttaagggtgaaatggcccgtgtactatctttttgatcacgtaattcaatctctgcttgtagcgttgctaaaggcgtcataatccccttagctgtattttcagcataacggcgtttagctcgttcttgggcacttgccaccataaaaattttaaccttcgcagcaggtaacaccgttgttccaatatcgcgtccatccatgacgacttgaccttgatctgcaatctgacgttgccgtgcaaccatctcagtgcgcacaccagctaaagctgatacttgtgagacattattcgtaatttcaggggttcgaatggctaatgtaatatcttcaccattcaagaagactttttgccctgcttggtcaggtttaaattggatatctgcttcttttaaagctgctaaaattcccgcttcatccccgaagtctaaccctaatttctgtgctaacacggttgatgcgcgatacatagcacccgtatcaacgtatacgaaccctaatttagtagccacaattttggcgaccgtacttttaccagatgatgctggtccatcaattgcaatttgcatgttctgcctcctgaaaaaatcattaaaaaaggctgggagtttccccaggccttttggtagtactgattatttaacttttagagctgtgcctggtgccacttgtgaattggctgttaacccagggtttaatgcaagtagttgatcgagtgttaaaccgttattaaccgctgcgcggtataaaccttcgccggctttcaacgtataagaaccacccgttgtttcgcttgaactgctactttcagttgttgtttcttcgctactactattttgagcgtctgcttgagcttggctttgactattagccttttcagcttcttctgcagcttgtttgctactttcaactgcttggctttcactagccgctttttcactttcagcctgtttagctttactttcgctggccgctttggtagcactttcgctagcagacttcgcttttttagcttctttcttagaagcactatcactatcagaagtattaacgacaatcttactagactcgactgggcggttagcccggctagaatgaatcgtataggcaataatcggaaatgcaatcattaaaacaagcaatacacctagaataatggcaaaatatgtatttcctttttccttactcttggaagcaacacgcgataaattcccgcgatcatcacgatcatcatcaaactggctttcccagggtttgtcttccgtctgattatctaattttttcttatcatctttgagcattgacggccctccctattggtattctttgatattgtaccatagacccttttaaaatacccagaaaatctctaaaacaattgcttcaaaataccgtcccaatggtctaacccgtctattttaggggatttatcatcagttaacgtttttaaattaaatttttctaaaaagaccgttgaatcctgttgaccacaacattgatcagcatgggcaacctgttggggttgctcgtcaaaatagttcacaataaattgccgccgacagccttgtaagtttaaataatcaaccattgtttgaagcgcaaaacgcttttctttttgccgattctgtaacagttcactaacggcctgttcatccatcccaatttgctgataccgccgtaataattcaaactcgttgccttggctttgtttaaataatgtcggttcttgatagaaacgccgaatcaatccagcttcaggaatcccaaatgacactaacgactgttgcagatacgtatcttgcggtgttgctaacaacattgcataggctggttggccatcgcgccctgcacgaccgacttcttgtagataactttcgatattttgcggtaaatgatagtgaatcacatagcgaatattggctttattaatccccattccaaatgcattcgttgcgcagattacgtccaactgcccttgcataaactgttgttgaataatgaagcgctcctgtggcgaaagcgctgcgtgataataggcaactcgcatcgctgtcttttgttgcaaaaaagccgcaatctcgacagtcttttgacgacttgaaaaataaataatcccgggcccctgactctcagttaccaattgttgcaaaaaggcgttcttactcgcttcatccgcttgttgactcacccctaagtaaatattaggacgatcaaccgacgtaataatcctattggccgactgcaaatctagcttggctaaaatatcatgccgaacctgtgcatcagctgttgcagttagtgcgagcgttgcccccggatttaattggtgcttgatttgcgcaagcactaaataatccggccgaaaatcaatcccccattgtgaaatacagtgggcttcatcgatgaccaataaatcaatctggcattgttgtagtgcttgaatgaccgccggctggcttatcgtttcaggcgccataaacacgaaacgatactgtggcaattgtcgcaataacgcatgcttttgccgcggttccaaatttgaattaatcgcgactgcctttttttcaccttggtaattcaactgtgcgacctgatcttgcatcaatgcaattaaaggtgaaataatgacagtggtatggcccaaaagataggctggtaattgataacataatgattttcccgtcccggtcggcaaaaccgccaaagtcgcttggcccgccaaaacagattgaatcacttctaattgtcctggcttaaatgtctcatagccaaaccgctcttttagcgttttataaatcagttcatccgtgctcattgggcgttcacctgcctttgaatttgataaagccgatactcaaagaaatctagaccggggagtgcggtttgtgcttcattatagctgagcgatggctgttcagtcatcaatctagctagtttttgtgtagttgcatcctttaagaattgttcaaacggaaaccgtgggagtaacatcgcggtttctaaaaggtgttctttaatcgttccgatcttaacccggcgctggcggctgatttgtttaacactcgccccttgttggatcaattgccaggtctgtaacgtactctgactcaattgcgtttcagcctgatccactaattcattcaatagcggataagtcgtttggtgcgccaataaaagccctaaaatttgagcaaaggcgtcgatggtccgcacacgaactgtcaaggatgggctatctaaggcttgcgccagttgttggtggcttttgcccaagacttgatgtccgatcagttgatttgccacaagatcggcttgttgcggatctaactggtcaagtaattgcgccaattctagctggaattgactgctaaaattgatggttgccttatgccgcttaaaccaactgaccaccaacacgcggtccttcatactcgtttccaatggatagtactgcgtattttgatgatgatattccgacacaatttgaacggccaacataaaacgagcagtgaattggggtaagtgacccatctgtgggccttcatagtgcgtcggccaaactaattgcggctgccattcagcttgtttttgttgcccggtagcagtcaaccaaacataccgctcatcgatttcaatccaaccattttgctgaagtcgttttaattctgcttgaaattgtgcctgttctagattaggataaatttggagccattttaataatccatatgctaaaccggcatacagatttgaagtagttcgtttaccaattaaggtatagtagattgcttgataccgccttttctcaggcgccaacaagcatagtagatacgccattaacatcatcaattaagtcctttattgagaaagtgtgaatttaatgctctatagtcaagtcatcccggaacgctgtatcgcctgcggtctctgccagctaaaggcgcccgacttattcgattacgatcaagaagggatcgccttttttaaacccgatcataatcagggaacgacgccaattgaagatcctaaagaacgaattgcgtttaaaaccgcctacaccgcctgtccaactggtgcgattgtacgccaatcaacgccatttttatcgtagcatatttacgtcctataaaaaaggttgtgcccgcttggacacaaccttttttgctgccatttatttggcaattggtttttgcatatgttgttttagccatggtaaaatccgtaaatataaaacggcaaacaccaccgttacgagtgcacctttaattaaattaaacggtactaatccaaatagaatgtatttggtagtcgacattcctaagttcaaacccatcaatttaatatagagcggtaaaatgaaaagccagttagcaaatgacatgaagatcgtcatgctgacagcccccgcaacaccagcaattgcttgacctactaaaacgttcgattgacgattgaataaataatagaatggtaacaagtagcagattgacgccaagacaccggcaaagtcgccgaccaaactcggtaagctagcaccggtcataatgaaatgaagcgtcgagcgaatcaatgcgacccccattcctccaattggtccgtaaacgaacgtccctaacaggacaatcacgtcactaaaatcaatttttaaaaacggaaatgcgagaataattggaaattcgaaaaacatgacgacaaatgaaattgcccctagcattgcgaccccaatcatcgtacgaacttttgaaacttgcattactaacaccctccagatgaggttgccttcgtcagcggacttagccaagtctgattgcatcaaaaaggtctgttaatcagggagattaacagaccttacttgcatacattcatacccaaataagccctatcttcttccatctagactttcactatcggtactggaatcacaccagttcagccaccacaagaatcaacattgtagcaggtcgcggacttttaccgccggtcgggaattacaccctgcccctgaagacgaaccattaatattttgttcgaaataagcatagcaaatcaacgtgccaaaagcaactaattaatcatgccgtgataattttggtcgattcttatgctgtggtttttcatttagttcagcaatttttttgaattctgcgacttcgattggtttcaaagcacggtattcgccagaaactaacccatctaacgttaagaaaccatatgtttcccgtttcaactttgttacgggtaggccaaccgcagctagcatgttcttaacctgatgattcatcccttcgtgaatggtgatgcttacaatggcagtgttcttacgccgatcagttgaaattactttgaccttggctggtgctgttttgcgtttttctaagacaattcctttacgcaattggcgcaacatatctgcagttggtaatcctgaaaccttcgcaatataagtcttgtcgactttatattttggatgcatcatcatgttggcaaaatcaccatcattcgttagtagtaataagccagatgtatcgtaatctaatcggccgattggataaacccgttcaacgatatcgccaaggtattcagtgacgacccggcgtttcttatcatctgtcactgctgaaatcacttggcgtggtttatacaagacataatagaccttgcgttcacgcgttaacggcacaccgtcaacttcaatatgatcgcttgtgctatccaccttgatacccatttccttcaccactttaccatttaaggtgacgtgaccagttgcaattaaggtttctgctttccgtcttgaagctaccccagcatttgcaatcactttttgtaatcgttccatttattgttctcctttggacgtctcttccgacgtcgtatctgtttcatttaacgtttgttcaaattgacggtaatacaagtctgctgtaccaccttcactaccatcgacatcagcgtcaagtgccaattgttcaagtggtggtaattcatcgagcgattcaagaccaaagtaatctaagaaataggtgctcgttccatataaaattggccgaccaggcgcatccttacgccctttttcgctaattaattggcgggctaacaaggtttggatggccccactactttgaacacctcggacctcatcgacttcaatccgcgtgattggttggcgatagacaataattgccaatacctcaagagcggcctgactaatactagttgacaccggtccatcaaaataggtcttcaacaacgtcgcgtattcttttttggtgactaatttatagatatcttcggcttgaatcaggttcaaacccgattcagtgttgccgcggtaacgatttgccaatttttctaataactggcggactgccggttcatcgagatgaataagttgcgcaatttgcgcaagcgcaattccttcgtcccccgcgacatataataaactctcaatttcagcgagatgattcaactgaaatgccctccttcaaccgaaccatgattggtgcatcatagtcggcttgttcgcaaataatttttcgatccttcatcaattctagtacggctaaaaatgttgtgacgatttcatctcgatctgttttaacaacgaccaacgcttcaaaagcaactggttgagcggctaaatgacgcacaatccaactcattttatccgtaatcgaaatttcgtcattttggaccgttttgaagaccggttgtttagcttgggcttcgaccaacattttagaaactgcggccgctaaatcgcgtggcttaatcacgccgcgcgccagtgggaccactttttcagctggattactactagctggcttagcaaagagctgttggcgctccaattcgcgctcttgcaaaaccgttgcgaccttttggaaggcttggtacgccaatagttggtccactaattcctgccgtggatcgacgtattcttctgtttcttcttcaattaattcaggtgccttaggtaagagcaacttactcttaatcttcatcaacgtcgccgccattactaaataatcacctgcaacatctagtttcaatacttgcatttggtgcaagtaatcaagatattgcgcggtgatttcagcaatgggaatatcataaatatcaatcttagtttgcttaattaaatgtaataataaatcgagtggtccttcaaaatcagtcaagaccaacgttaattgttcagtcattggtcaatctagtccatttctgtattctgatgttgttcccatttagcaatcaatggcgcagtctctaacgaacccatcacgcgactttcaggataaagcgccgctaattcatccaacatggtgaaatagttctcgtcgctacgttccgaagggttcagtgaaatatggcgcactaaaatatagtccgcacccagttcaatccccacaacaccggcaaaatcgccggcttcattgcgccataaatataaattgcgttgctcatccgacgtatagagcgccaattcagcttgtacatgactgacttcttttaaatccggtacgaaggataaaaagcccatcgcaatcttttcataatcatttttatacttgaataacatgttgacctccattgatcaaacaaagttctaatagcattaactctaccatagtttataaagcgcgacaaatctaatttaatcgcgtggatgactccgttggtaaacttctgtcaaatgtttcttactaatatgcgtgtaaatttgagtcgttgaaatatctgaatgccccaataattcttgtacaattcgcagatctgcgccattttcaagtagcacagtggcaaacgaatgccgcaatgtatgtggggtcacgtctttttcaatcccagccgttttaacatgtgccttcaggttcttccaaatcccttggcgcgtcaacccgttaccatggaaattaacaaacaggtacgggttagcacgccccttcgttaattgattccggctacgatcgaggtattgattaatccaatcaaccgctacatcaccaatcggtataatccgttccttattccctttgccgagggtctgaattaagcccagtgataaatgcaaatcagccatctttagatgaatcagctcgctaactcgtaaccccgtcgcatataaaacctctagaatcgctcgatctcgtaatccaagtgcggtgctcgtatctggtgccgccaatagtcgctcaatctccgccgtcgataaaacagccggtagatgacggccttgtttgggcgaatcgatttggagcatcggattttgtttaatctgcttttcacgcgctaaatactgatagaatttacgtaacgttgaaatgctccgtgtaatactactttgtgccttatgcacatcagtttgttcttgcaagtagttcaaaattaaaaagcggtcttcagtaaaattggcaacctgctgacgttgtaaaaacgccgcaaactgttgtaaatcctgccgataactctggcgcgtattctccgaaagaccgcgttcaacttttaaataatgtaaataatcttgaattaaatcatccatgtgcttcctcttttacaactgcgtcacgtcaatttggcgactaggatccagttgattggctggtaacccattttgttggttaatctgttggcaacgtgcacaaatcccgtgaaatgttaaacgatgatctaacaccgtaaatgtgtaatcatcatatacctgttgttccacggcaggcaataaatccgtatgaatttcttcgattgccccacattgcagacacaacaggtgatggtggaaatgatggtcgtgatcagtctcacacaagtcatagtgggtcatcccatcttcaatgaaccgaactttattcaacacatgcagttccgtcaacatctcaagggtgcgatacacagtggccaacccaatttcagggaccacctctttagttgccataaaaatctgttcggcactcagatgcgcttgggcatggtccaaaatgaccgccaccgtcgcagagcgttgtgctgttaacttgtagccggccgcttgtagctgctcggatattcggtctaattgctcagctttatccatttagcaacttccttttcaatcattcaaaaaagcttagtcttgcttctcgtcatctgtaattggggcaatatcagcttgacctttttcagttaaactcgttaggccctctgcttgagtaattaagccatttttcattaaccggcctaatgcccgcttaaaactgcctttactaatcccaaagtaactcttaatcgcttctggatcgctccggtcagtgtatggcattgcgtaatcaggttgccgttttaagacagccataatcatttcagcatcgtcgccaatttcttcatatgcccgtggtttcaaactgacatttaaactaccttcaggtcgcacaccaatgacgcgccccttaacctgttgacccaaacgtggttctgcttcacgttcagaaggatgaatgaacccaatgtaaaagtcatccgttaaaataaacgtcccggctaacttcaaacggtagaccgtccccatcacgtcttggttcttcatttctggtttagcaccttttgaaattgatctgaagatgctttcgtcagctagttggccccacatccgccctttttgatcgacttcaatcgcaatcattaaacgatcacctggtttaggccataatttcgtaatggttggtaaaatatccagtgatacgacaatatccttatctggcaagccaatattgacgaaaacgcctaaatcacgccgcgtttcaaccacttcaccaaaggcataatggcccacgcgtgatttaggaataaacgttgataagatcaattcccgacttgagttttcataagcaaaaccagtcaccgtttcaccgattgtcaattcttgttctaaagtttctttttttaattcaaatgtcacgccgtctttttggacaaagaaggctgtttcattttcatctgttactaaggcagtaatgacttgcccgattaattcattcatagttaacctcttttattcttattaattaatgaattggtactaaattaaagaccgttaaaatggtataagtaatccccgctgcaattacggggccagccgcaatcccttttagaaaaacgacacccatgatggtcccaaaaaccaaggccactgtcatctcaggactagcggacaatagccccacacccttcgctgatagtacagcaactaacacgccacaaccaactgcaataaaacccgccggcgttttaaaggcattgattaagtctttgacaccaatttgccccgttgcaatcgggactaggatagcaaccgaaatcactgtcactccccaattaatgcctttggcttggatcacaggcagcaccttatttgaaatcgggaatacctttaatattaaaacaaccgcggtcgcaatgattaaagattgatttttcgctaacaatgcaacgattaaaatcgctactaaaaataaccaactttccatgtaaacctccaataaagtctccctactattgtaccgataaatgaacgacttgtcagtattttcagaaaagtaattcaagattcgcgtttttaaaacaaaaaaagccccctcttttcagagggggcttcatttcatcattcaggaatgattaaagagcgtttgttgcaccgcggtaaacaatcccacgacgtgaatcaacagtcacaacttcgccatctttgatagcttctgttgcgtctttagcaccaacaacaactggaatacccatagcgataccaacaacagcagcgtgtgatgttaaaccaccgttttcaacaacgatagcacttgatttttcgattgctggtaagtaatctttgtcagttgatttaacaactaagataccaccatcaattgctttttcagcagcttctttagcgtttgaagcgacaacagccttgccaacgattgtttcatcgccaacaccttggccttgtgttaattttgaaccaattaattggatcttcataacgtttgttgtgccacgttcgccaacaggaacaccagcagtgatcaagattaggtcgccttctttagcaaaaccatgttcttgagctgtttgtgtagctaagttgaacatatcatctgtattagcaggtttcttagcgataactgggtatacaccatagttaactgttaaaccacgacgtgtacgttcgtcgaatgtaacggctaagatgtcagcttgtggacggtatttagaaatcatacgtgctgttgagcctgattctgtagcagcaacgattgtcttgattcctaagttacgtgcggtgtgagcaacagcttggccaattgattctgtcaagttagtcttgctgtatgctttcaatgcgtatgcatcgcggtctgttaatgatttttctgttctttcatcaatgcgagccattgttgcaacagcttctactgggtagtcaccgttagcactttcacctgaaagcattgttgcgtcagtaccatcaataacagcgttagcaacgtcgttaacttcagcacgtgtaggacgtgggttttcttgcattgagtccaacatttgtgtagctgtgataactggtttgccaatagcgttacatttcttgatcaagttcttttgtacaaaaggaacattttcaaatggaatttcaacacccatgtcaccacgagcaatcattaaaccatctgaaactttcatgatatcgtcaatgttgtcgataccttcttgtgattcaatcttagggaagatttgaacatgttccatgtgtttttcttctaataattcacggatatctaaaacatcttgaggtttacgaacaaaacttgcagcgataaagttgatttcgtgatctaaaccaaaacgaatgtcgctagcatctttttctgtgataccaggtaagttgattgaaacaccaggtgcgttaacacctttacgtgagccgaccataccgtcgttttgaacttcagtaacaagttctttgtttgcttcgtctttttcaataattttaagatccactaaaccatcatcgattaaaacgtgtccgccgacatgtgtgtcgtcgtatagacctgggtaagtaacagcgattttttcaggtgttccttcaagtgtatcgtccattgaaatacgtaccacttcaccagtgtgtaattcaaatttcttaccttgttgaacagttgtccggatttcagcaccctttgtatctaacatgataccaactgttttaccagttaatttttcagcttcgtgaaccatgttcatccggcttaaatgttcttcatgatcaccatgagagaagttaaagcggaatacattagcacctgcttcgattaattttgcgatagtttcaacattgttacttgcgggtccaagtgtacttacgattttggttttcttcataagtggaatctctccttttatgtctattttttaaaagacttttcagtcgttttaacaattttatatatggaacgatgaatctagtaagctaaatcttcgtttaaatcataaagatctaacattgcgtgatgcttgtgattgaacaagtctaacatatcatgtgcgataatttcgttcttttcaatcccaagtgcaacgccacctttgccttcaagcaataattcaactgcttttgagcccaaacgacttgctaacacacggtcactagctgttggtgccccaccacgaacaacgtgtcctaaaacagttgaacgtaagtggaaatcgccgtattcagaaagtttttctgagaattcatcagcgtgcatcacaccttcagccaatacaatgacagcgtgtttttgaccatgttcacgtgaagtacgtagcttatcagcaacggccttaacgtcgaaatcatgttcagggataataatgtcttgtgcgccaccggcaacaccagcccaaagcgcgatatcaccagcgccacgacccattacttccacaacgaaagttctttcgtgactagcagctgtatcacggatccggtcaattgattcgagcactgtgttcacagctgtatcgaaaccaattgtttgatctgtaaatggaatatcgttatcaattgttcctggaagaccaattgcgttataaccatgttcagttaaacgaagtgcaccgtgataagaaccatcaccaccgatgacaactaaagcttcgataccaaacttcttgagttgttcaatacctttcaattgtccttcgacttgtgcaaattctggataacgtgctgagtacaagaatgtcccaccacgttgaatcttgtcaccaaccgtaattgggtccatcttgaagatatctccggcaactaaaccagcgtaaccataattgataccatagacttcaaggccttcatgcattgcttttcttgcaacggcacggatggcagcgttcataccaggtgcatccccaccacttgtcaaaatacctatgcgtttcatcttttcaccccaggcaaatattttacttaaaaaaccaattggtctttcaaagtcactaatatattatcacttttcagaaaataagtcttgtcttttgcgaagattttcgcaaagatagaccaatttctttattggtcaaacccttttaaaatcacatttcccgtccctaaaaggtttgtaagcgcggtcgttagtttttcgttgctcacaacccaatagcgctcgttcaatagaattgactgtttatcggccgcattgtacaagataactggcgttgttccttgattttgttgtaacaattgatacatttgttgttgcgcttgactcgtcaacgccgtttgaacccgtaaataaagggtcgctttgggtagcgtcttttgtgcatcttgtgccaattgaatctgattagcaaccacttgtaaatcgcgacgttgttcaactttcccggtgataaaaacaacttgtcctgtttgtagccatttactgacccgttgataaacgccagtaaagagcgtcacactaatttcaccggttgcatcttgccccgttacaaacgccatttgatcgccttttttcgttcgaatcaccttaattcggcgaatgaatagcaccaaatggaccgtctgctcgggtgccaaatcactgatatcaggcacatggtagtgttggcgtacacgatcatatttttcgaccggatgccccgaaacatagaccccaagatattcagcttctttatccaatcgttcagtcaaggttaaattcggtacggcacgttctttcggtgctaaaacagcaaataaatcgacgttattccctgacaacttcacactatcaagcaggtcggctaagttggtcaacagcgcattccgattcggattaaactgatcgaaggcgccactataaatcaaggcttctaatgcctcttgcttgagaaacttaggatccatccgctgtaagaaggccagtaacgatttaaacggtccgttcgttgtccgttcttgaataatcgccgccacaaaatcgcgccgaacttttttaatgctgaacaaaccaaagataatccctgagtcggctaatctgaaataactttgactgcggttaatatcaggtggcagcactttaatttgacgtttcttagcttctgctaagtaagttttcgtttttgtcggattgttcaaaacggcatttaataaagctgcaaaaaaggctgctggctgatgaacctttaaataagccaaccagaaagcaattttactataagcaacagcatgtgaccggttaaatccataattggcaaaccgctcaatatagtcgtagactgtcgtagcagcagtttctgtgtgcccgcgttcgagtgcgccttgaataaattgcgtccggctagcatcaatcaccgccttcttctttttactcattgctcgccgcaataagtcggcttcgcctaagctaaagccccccatcttggacgcagcctgcataacttgttcttgatacactaagatcccatacgttggctctaaaatatcggctaacgacgcgtccggataagtgacaggttcttgcccgttcttacgagcgataaatacgtcgatgttttccatcggacctggtcgatacaacgcatttgtcgccacgacgtcttcaaaagaactcggtgccaaccgccgtaaaacattcttaatgccaagtgattcaaattggaaaataccattagtatcaccatgttggaataatgcaagtgttttaggatcatccaacggaattgagtgtgggtcaaacggctgtcccgtttgctgtccaacaagctttacaatattagcaagaatccctaaattacgtaatcctaaaaagtcaatcttcagtaggcccagttcttccacgttgcccattggcaattgtgtaagttcaatctcttcaccgccactttgtaatgcaaccgtatcagttaacggtgcttggcttaacacaatcccagccgcatgcgttgagtagtgtcgtggcagtccttcaagtttctgtgctgtctcgaatagtaatcgattttgagcggaatcggccaccaaatttttcaatggttgtgattgttgataagcttcttttaacgtgattttcagcatgtccggaattaccttagcccaatcattcatttcaaactgacttaagccaaacacacgccccacatcacgtaacgccattttagctgccagtgtgccaaatgtaataatttgcgccatatgattccgaccgtatttgtgatagacataggccagcacttcatcccgacgattatctgggatatccaaatcaatatctggcatattcgcccgattggggttcaaaaaacgttcaaacaacaattgatattgaatcggatcgacatcagtaatcattaaagcataggccaccaacgaccctgccgcagagcctcgccctgggcccgtcataatatgttgttcatgggcatgccgcatgacatcggcaacgattaagaaataatcggcaaagcccatctcgttgatcactcgcaattcatactgcaagcgttcttgatattcttgcggaatcgcttgatcggcaaaccgaacttgtaagccttgctgacttaactgttctagatatgccgttgccgactcttgatgcggtgtttcaaagcgtggtaattgggcccgcttaaaggtcaactcaacttgacagagttgggcaatcttatccgtattgtgcacggcctcgaccaactgcaatgcttcaaactcggccgtaatctgatcagcagcttgtaaataatagccgcctggcgttgtctgatcaccactatggagattaacttgcgtaccagctttaatatgttgtaagacttgcactgaaaaagcatcatctggttctagataacgaacatcacctaacgcaaccagcggaactccggtcgtctgactcaatgcaattaacccgctaagttggggggctgctgctcgcttggcactgattcctaaatacaagctccccggatcaactgccgcctggagttgcgtcaaatatgccgttgtttgctcctccgcttgcaaaagtaggcggactaattcgccatcttgagccggtgtgatcactactaaatggctgaaccactgtgtaatatcagcaaatgaaaccagatcagtttgagtcatcactttagaagaaagcttcaaaagattctgatagccaactaaatctttcgccaatacaattagcggaaaccgttcatcggtttgaagtaatccgccaatttcaagcgttaaacccaagattggatgtaagtcagctgccttggccgccttataaaaatcgactagcccataaatcacgttcttatccgtcagcgcaatactctgatagccgcgcgccttagcactttcaatcagtgcatcaattttagtggtactttccaagagcgtataggtactcttaacctgtagttgaacgaatggcaagcaacgccccttctttcttcgttaattcgattactcttagtataacaaattatttcaaatgattctctttggaaaacgtgttacaatatcatagaattgaatcaaagaaagaaggccaactatgaaatacgttatgaatctactttggacattgatttttgggtttgtcattggatttatcggttctaaactaacgaaaaccggctttaacattcaaacaactgttatcgtctcagttatttttgggcttttgctcaacttcttacctcttgtcttaccaaaagatccagctaaataaagcacaaaaaagggccgcaactttatgttgcggccctttttacgtttattttgtaatgtaaatatacaaattacttgttgaaaaaccggtattgaacttcacaccatttgattcaatcgtcttcatcgtggtttgactaccttttttgtttttcttcgtataatcgctaaattcggacatcacttttttggaatcagcgcccgttgcttgcgcaatcaatgcaaaactggtcccaaaatctttcaatgccgctttatctttgagcgctttaacgggtgtaatgagcgtcatccccattacatcttgactatcaacagaaccgcgaatggtgacatgctttgttgcgacccattcagtcaccccatttttaggtgtggttggtagcaattgatccttttgtgtctgttgcacctgttgcattgctgcttgtacttcctgttgccgctgcttaagtgtcatcagatcagcaggtgcaagttggcctgctttggcagctgctgcttgtttttgcaattcctgcgctttggtttgatctgccttagataacgccatcccaattaaagcctggttgtattgcgcggcaatcttggcatattggccaactgatgtgcccgctgcaatcgttaccttcttttgaacggttttaccgtttgctttagcttgtaccgttactgtttgtttgttagtcgttgttggtacttgaatcacataagttccgtctttgaccgttgctttttggaaatgattatgattaatccggtattgtaaatcagcttttttggttgttgaaccttttacgactgccaccattccattttggcgataatttgttttagtcgttgttaatttggttgtcccacaaccagccaatagaccgattagccctaagctggtcactaaaccaacaattgtttttttcatattcgtcaccttttcattgaaatttaactcattgaaatcttagcttaacccttttagaatcacaattcaagcgaaaacgacgaagtgtcacattttttaagaccaatcaaaaagagcgaccacttaacggccgctcttttaaaaacttattttaaatttgttttcttttcataacggttaaacatatataatgcaacaattgtgaagaagatagggccagcaactgaccagattgtttgacttaaattaccatcaattgctggttgaataatcgtaaagacgttcgcaaaaccaactgtgaacatgaccatgcagacacagaatttatagaaggtcttccctttataaattgtaaatggtttttcgatactttcatcctttttaaagccaaagtatgagtatgccacaaacatgtatggcaatgtcattgaaacgtttgtcatcgctgttaagatatcgaagaacttagcagcactcttaccaccaaaagcaacgaaggcaataatcacaattacaattgcagcttggaccttcattgcattgaccggcatattattactatttttcttagtaaatgacttaggccaaaaggcagcaggtgtcccttcgataattgtttttaatggtgagaaaataattgtaaagaaagcaccactaagtgctaagaacattgaaagccccatgtaacgactgagccaaatcccaacttgaatagcagcatgttcacttaagtgcattgctaaccctaattggtaacccatgttgttcatggcaatataagcaacgttccccaaagtaacggttgcgtttgaaccggttgctttggcgaagccaccaccattggtaaagacgaagttccagttagtgaaagtccccatcataaaaatcccaacagcatagccgacaacaatcacgacagcagaaatagctaacccttttggaaagttaaccttagcgttttcagtttcatctactaatccaccaacaacttcaagaccaccataagcgaagatcgcaaatacaacgaaactgaagacttgaatcatcgatgtatagctttgatttggtgattggaagaatgcatgggttgtaacaggttgtgccattacccctttatttaaaacaaggattaacaaaccacccaagaataaaatcacgttgattaacgtaatggctgaaccaccaatactggtgattttcttgattttatcaaggccttttgatgtgacaaaggtaatgacaatgatccaaataatagctaaaattcctaatgtttgcacaccatttgtcaaaccaaagattgaccattcttgtgttttatcaaccccgaaaaaggcgtttgataatggaatccaaatcccgttcccgacgttaaccatccagataatgtatgaagcaaaccacataaatgtgccgacaaaggcaaatttagcgttaacggatttctccatccaagagtaaatccccccctttgcttcaccaaaggccgctcccatttctccgagcataaatgcataaggaataaagaaggtaacagctgctaaaacataccaaaaaattgatgcatatcccatcaagtagaacgcacgtgggatattcgtaaatccaaagactgacgtaaagaccattagaataagcgcaccaagcgttaacttattcgtcttcttcttttctgccacctaaaacacctctttcatttttttcagacttaaccacaatgattaatcctctgaataaaaattagttaactaacatttgttaataaactaattagttacctttattttacggcgaaaatagaaagaggtaaacgaattcattatttttgtaattgaattatttgtgaatcttaattcaattctcattttctagtcaattacttattttttgctggcgttttttcttcaactggttctttcttcaaagtaatcccaattgcaatcttatataccacactctgacatgctaatttcagcaatgtttgttggggttcagtgaccaatgtacctgctggatttttgccttggtcataggggctgtaatcctcatctaactgatgaatcgctgctaaaaacgttaagataaagtaatcataaagttgcttttcatttcggttaggtgtttccgctgtcatcaattgtttgatttcttcaatcgaaaaactcgttttcaatagtgcaataattaaaacttgagcaatttgcgattttgtataccgttttttaatcggtgctgccacaatttcttttttgacgtaattattaatcattgaagcggtgatttcatctaaatttaacgcgtttaggtattgattgatgtaactaaccacttgatccatatatagttccaaatcgggcaggtctgtccaacgtggtaagcgtacaatttgtaaacgatcgagcttttgtttcaagtgttcatttttcataattatcaatctccttttattcaatactaattataccaccatctagtatttaaaactaggaaactgcataaaaaaagagtttcttattcagaaactctcgatgacgattagtcgttagcttttggtgtaacaacttgttcgcctttatagaaaccttttggtgatacacggtgacttacacggtattcgccattagttgcatcgaattgtacgtttggtgtgttcaatttgatatgtccacgacgcatacgtttcttcgtctttgatgttcttcttgctggaactgccattattttcagactcctttatatcttagattcattaatgatataccgaactcggggaatttggcaaggattatctcaatcccattcaaattgattttaaatcatcacgtgtcccgctacttttgtccgcgacttctataatactatgtttatccgctaagagcaagtcaattacagaaaaacaattgattaacgactcttaatgacaccactttcaaagtggaatcgtccttaatcgtcactaacattctgtacatcatccccaataagtgtaccatacaaacatcaatctgacagtaataatccctgattgatgtccaaaaaaagcgccgcaaattaaatttgcagcgctttttcaatcgttagcgattttcaaaaactaactggttatcttttaagttaatttcaaccgtggttcctggtaacatatgcccggcaataatttctttagccaatggggtttcgatatggttcgtaataaaacgccgtaatggccgcgccccaaatgcaggatcgtaaccttcttctgccacccattgtttagcagcatctgaaatcgtcaatgtcaattcttgatctgacaaacggtctgatagatcatgaagcattttgaccacaatcgcttgaatatcgttcaagctcaatggtgtaaacataattgtatcatcaattcgattcaagaattctggcttgaatttcgtctgaattaagtcttgaacactttccttagccgtttgtgaaacttgaccttcttcatctacaccgtccagtaagatttcagaacccaagttagaagtcataatgatgattgtattcttaaagtcaaccgtccgtccttgtgagtctgtcaaacgaccgtcatccaacacttgtaataaaatgttaaagacatctggatgggctttttcaatttcatccaataacacaattgtgtatggattccgccgaaccgcttcagttaattggccaccttcttcatagccaacatagcccggtgcggcaccgaccaatcgtgatacagaatatttttccatatattcactcatatcaatgcggaccatatgccgttcagaatcaaataaatcctcagctaaagcttttgctaattcggtcttcccaacccctgttggtcctaagaagaggaatgagccaagcggacggtctggattttgtaagccagcccgtgaacgtaatacagcatctgtcacagcattgacagcttgatcttgaccaattacccgttcatgcagaacatcggcaagacgcagtaatttttgtcgatcaccggcaactaatttggcgactggaatcccagtttgggaactaaccaccgttgcaatttcattttcagtaacggattcctgaaccatccagtcctctggcttttcagccttttcaaggtcggcaaggtcttcttctaattgtggaattgtgccgtgttgcaacttagcagccgtttctaaatcataatttccctgtgcttcttctaattgccgtttagcagcatcaatttccgcttttttatcattaatgcggttcaaatcttctttttcagtttcccaccgcatctttaaattattcgttgtttcgcgtaaatcagctaattgtttttgcgtctcagccaatcgtttttgcgaagcggcgtcggtttctttctttaacgcttcttcttcaatttcaagttgcattaattgccgcgttgcttgatccaattccgttggttgtgaattcatttcgacgttaatgttggcactggcttcatctactaagtcgattgccttatccggtaagaatcgatccgtaatgtagcgatttgacaacgtcgcagctgcgactaaggcattatcgtgaatccggacaccgtggaaaatttcaaaccgttccttcaaaccacgtaaaatactgatggtatcttcaacggatggttcttgaactagcactttttggaaacgccgttcaagcgccttatctttttcgatattttgccggtattcatccaacgttgtcgcaccaatcatgtgtaattcaccacgcgctaacattggtttcaagaggttcccagcatccatgctaccttcagtcttaccagcaccaacaatcgtgtgaatttcatcaatgaagaccagaatccgaccttcactcttcttaacttcctttaacacagctttaagtcgttcttcaaattcaccccggtatttggccccggcgattaaagtccccatatccagtgaaataattgtcttatcttttaaattatcgggcacatctttacggacgattcgttgcgctaatccttcaacaatcgccgttttcccgacaccaggttccccaattaaaacggggttattcttggttttccgtgacaaaatccgaataacatctcgaatttcttcgtcccggccaataactggatccattttgccagaacggaccgctttgattaaatccgttccgtatttttcaagcgcttggtaattatcttcttggtttttagatgtcacacgctcgcctcctcgtaaatcagtaatgactttctttaatttttgttcagtgacattttgtttctgtaaatattgaacgagtgcctggtatttcaaacccattaagcccaagatgaccgtctcagttgataaaaattcatcttggaattctgttttgtatttttcagcagcagttaatacttggtacaagttttgtgagatgttttgaccgtaattcgtttgaccttcaaccgttggaattgcgtcaatttcacgatcaatctccgcctcaagagcatcgatatctgcaccggcttcttggtaaatttgccgtcctagttgttgtggttggactaaatatttaaagaggtgtggaatatcaatttcagtttgatgacgcgtcatcgcgattttctgcgcttctgcaagtgcatcttggacagcttgtgtcatttgttctggattcatagacgtcattcctttttcagttattttttaaattaagtgtcagattattctgactaattctataatagtcaaaataggtcaaactttcaagtaattcgcttataaatcagacttaagacggagagctggtaggcgagttcttcctgaaaagtaacacaaaaaaagaggctaagacaaaatctgtctctgaagtgaacccccgatattggaccaaaatccaatatcgggggtttttatattgaccaaatattctaaaacattaaaaataaaagttgttcaggattatctaacgtcacccttaggttataaattaatagcgagaaaatatggtattaagagtaactcactagttgtctcgtgggttcaacgttataaggcctttggcccaaaaggactggatgtcctatcacccaaaaaaatatttggttagctacatcttcaatcgttgtaacgttgttttgaccagataaaggaatcgaaaagtctggatattcactgcccggatcagtcaaatctgaaagccagtatcgtgattgaataatcaccgatttactcgtggtcgatttaacgctttcctttttctcagaaatacttgaactcgattctgaatcagaactctttgaactcgacttactatctgagcttgttgaagcactgcttgtcgattgtgattgcaacgaactggctaagctttcagaaactgagctcgcgccttcaattgcgcttcgtgggttcacaatcttagaagtcgtgttggctgtcaccgtctccttattcacagccaccgctaatgcgctaccaaatgactgtacgattgtagtggttaagaaaataattgctaaaattagatggacgactctcttttgcatatcaaatttcctcccagttctaatgcctttaaaactttgttacatgataatttttcgatattttgactatgttcatcaggcataactttgacggtatcactacttccccctaggctagactcccaagaatgcctatgcaggggtgaatattagtcatctaaccatcattacccaagaacaatatgtaacgatataagaggttcacaactcatgagttatgacctactatcatggattttttaaagtcattacgtctaacttaattttgcttacaaatgttgatataccagtaattaagctggattcagtccaaaacaaaaagcgtcttccaaacattattcgttggtgtctggaagacgcttttttaacccttattgtcctttttgggttgtttctgcggttattggctcgatttggtattctttttcgatattatgggctactcggttgaagcttttcatcatttcgcgccgggtaacaatccctgtgaactccccttcatccgaaatcacaggcagataggggtgatcaactaagagatggagcgtttcttcaatatcatatggatctctaatcgtcacgacatcggtttgcatgacatctttaacggtcagcttccgcaaattttcgaaactgaggttattcaatccgagcatcgtctcggtaattaacggcatcgtcaacatccctttgaacttcgaatggttgtctaagacgggaatgctcgaatatttcaccgtggttagtagaataaacgcatgttccaaggagttgctttcttgaacactcgcaacaacctcaccgggaattaagaagtgttctttattttctaataataagttcgaaaatgcatctgaaatcatcacttggcctccaataaactaatgctacttttagattgtaacaaagagcaaacacaaaagaccatccatagctactaaactttggatagtctttagaattaggcgcgtttaaatgtaaagtgtaactgcgaaacgggttcgaaccgacgattgtagtactggatttgatattggtcaggtgtgacgtctacaacggcgtatgtccctttcaagtcacggaactgcccccgtggttgggcaatgctgccagggttcaagagcagcacaccttcgtgcatttcacaggccaattggtgtgtatgcccatagaacgcgagattagcttggctttcttgggccgctaataaaagccgcattaaatcgccatttacaccatacaagtgcccgtgcgttaagaagattcgttcatttgcaactgggacaacaacttgtgctggaaattgaccattgaaatccatattgccttgcacaatggtcatttggttaaacaagggatcatcggttgttaattcagaatccccgcaatgtaacatggttactggttgatcttgatactgcgccactaactgcacgagaatatcgcgatcaccatgactatcactcacaacaacaaaacgcatactaaacagtcctttcggcgccaaggggcgttgtttttttgaaacgtgcttcttccgacatattcttccggctagctacatcagccaaatctaaacgtgatcctgccgtcgcacgctagtctttgatccattctttccatttatcttctaggttctcaattgcttttgcgcggtggctgattttatttttttgttccaccgtgagttgggccatcgttgcatctaattctggcacgtagaaaagtgggtcatagccgaagccgttatccccacgaggaatacctagaatttggcccttcacgttaccttcaacgactaaatcttcatctggtcggtctggtttagcaaaaaccaatgttgtatggaaggttgcggtccgcttttcagcaggcacacccgttaattcatagagcaacttcgcgttgttgccggcatcgttatgatcaccagagaagcgtgcagaataaattcctggacgaccacctagttcatcaaccattagaccagaatcatctgccaagacaggtaagtgtaagatcgctgcaatttgatccgcctttaggcgagcattttcttcaaatgtcgaaccagtttcatcaatgtttggcaattctgggtaatctaataatgttttgatttgaatcccttccgctgcgaagacggattcgaattcgcgggccttacctggattcttcgtggcaatcacgattgtttgttcatcggtatcagccacttggatattcggttgaacggcgcgttcaaaactggcttgacgttgatcattggttcgcgtcacaccttggctcgcacgtaaaataagttcgttgaattcactactattgactgcttgttgtccgccgagttcaagggcgatgatttgttcctgcggtgtggccaccatcgtcaccaagctagtcgctaggtcgctttccgcggcgtctgggtcaccgagtgactcaccagcgaccatcgctgctgtgacggctgcagcgacttgtttggggcctttgccttttggtaataaggttagtgcgcaataaacagcgttgaagagttctgctaataagccgccaccatcttcaagacaggttacggtgatagtgagtgcttcggttgccaataaggggcgtaatgtcgtttgcaaccattctaattggtgcgctgttatgccattgccattgacttgcaaggaaccttctgtaggttgaacagcagcgagcactttggtatcaccgcgttgccatagaacagaagcgggttgttgctttagaaaacgccaagtgacttgcactggccgtaaatcattatcagcacgattattcattcggaccatcgtttttttcctccttaatgataacttgttgggcttcaagggttgggattgctaaccattgacgcgcgattgcttcgaaattggttacagatccggtcgtataggtgtgtagttgcccagctgttgcatcggccaccaactgattgcgatcttgtaatgcctgaatcaaactatcaacagcggcatgcgcggggtcaaccagcgtgactgccggtccaactgtcttttgaatcgccgcggttaataatgggaagtgggtacagccgagaattagcgtatcaattcccgtcccgcttaatggcgcgagggtttcgtcaaccgtgttttgcacagtttcgccactcaattggtttgcttcaatcatcggtacaaaagttggcgcagccaaactcgtgacgtgtgtcgccggtttgagtgcctttagttgataggcatatgcgccactgttaatcgttccggtcgtggcaattaccccgacatgccgattacgggtcgttgccaatgccgcttggctacctggtgcaatcacaccgattacaggaatcgtcaattgcgcttgtaaatcaggtaaggcggccgccgttgcggtattacaggcgacaaccaatgctttaatattttgcccccgtagaaaattggtcatctgccacgcaaatttgcgcacggtttccgccggcttttcaccatatggtaggcgcgcttgatccccgataaagaccatgtcttcgttgggtagacgtttaagcgcctcttttaagagggttaggccccccacacctgaatccataaaaccaatgggttgtttttgcatattagatttctcttttcatttcaggatacactcgtaacttctattttctcttttttcggtgcaaaattcaactaaaacaacgggcacggccggcaattcacagttggcgttaatttttataaaaaataaagagttttcgcggtataataggagtacttataaaaaacgaaccataaaggagtgccactgtgactcaatcacgctatgaacaactcgcccaaaatccacaaactgcatcatatctgacacaggcaacattacgggatatcttgttaccatcaattcttggggccgaaaatgatgccatcagctattgggccggtaagcaactcgctttgcaattcccactcgattctttcgaagacctctgtgccttcttcgaacaaatcaacttcggccatctcagtcttaagaaacagaagaaggaacaatacttcttcgaattaacaggcccgattgtcgcttcacggattgcggatttcgatactcctgacttccaattagaagccggcttcattgcccaaatcctcgaacaacaattgcggattgtgactgaagccaaagcaaccattgaaaataaaaaaaacgtaacgattttcgtccaaacagattcaaaagcaccaattgaagacgaagcagtcgaagccattcatttaacggttgatgcatcacaagtcgcatctgtaccaagtgaatcagaatctgttgaagaagaaccagcacctgtgatgacacaacctgttgaagcagcccctgaagaagtggctgctcccacactagaaccagaatccgttccagaaacaccagttgttcctgaaccggtggaaccagaaaacaagccaacttctgaagaaacaccacactacacaagaacccgcgtggcagacttaccaagtcgacgagaaatgcatagaaaacacagataagcatgtgctataaaaaaagggtaggaacaaaattaaattttgttcctaccctttttgaatacttagcatattaaacgtgttaatcctcaagtgataaccggctctgtctcactctaatctaaacgtgttccttgagccatctctttccggttaaccccgaacgtcaaatgattgcttcgctatcattcaccgttctgtgttaatcctcaagtgataaccggctctgtctcactctaatcaaagtcatggacgttattgccgctgacgttttgccagtcgcgacttaagaagtcgtttgacatgtcatagtgcactgcttttgcttttttcgttctcatgaatggttggagtttttgatcaactttcaaccagccacgccagccaagatgaatcgtatcttgcatgaagaattgttcattaccgtcgttagtcatatcaacaatgttgttgaagccttgcgttctcaattgatattgaatcttcttatcaaaacgattcaacatcgcttgtgagagccctgtataagcggcccaacgcgcattaacgggtggaatgatgaattgaacagatactttatgggctgcgaagtagtctaacatcaattggaaatcagcaaactcaggtgaactttcatagttaaagtgactttgttcacccttcaatttaccaacattgggtttaacccgttttttgtaaaaactattttgaatgccaaacggattatcacccgttactttttgtcctaattccgttgcgacttgatcaagttgcatgttatcaggttgttttggtaacaccttcaagcctttacgcaattcgcgttcacgaccccgaatgaataattggctgaagagttgatcttgatgttgtaacgctgggcgtttcacattattaatgtatactttttgcgtctccgttaaaggtatgcctaaagctttgttcttcaatgcatcccgcattaccccgttggttgtatcacttgtgagttctagaattcgtttcgctgcataccgcgtactttcagaatccttcgcgtggattaagaaataactggtttgtagtggtgaatagaagaaatcgaacatctcaggttttaccccttgtggtacaaaccattgtggcgaaataacgacgacggcctttttaccgttcaagtgattaccagtcgcttgaagtgataaaaagtgggtcaatgactgagtccctggtgcccctagtaggaatggcttattttgccaatcatacttgtttgccataacagatggatgtaacgcgtccattcgggatagttcggatgaaccaatcatcggaatgtagttgtcgttaaatgcagcatctttgatggcttccccttttagcacattggcggataatgacgtcgccgctgtcgacaacgtcttttcgctaggtcgtcctaatcgaagaggtgatagtaataaggctgttaagcagagaccggccactaaaaccgggccgaaaatttgccataaacgtttaaacattttattgcaattcctttacgcgagcaatgatcttgttaggtgttgaccatgcttcacgatcgaattctgaaacaggtacttcaatatctaattggccttgtaattcaagtaacatttgcacagttgccattgaatctaatgtccctgattcgaataattccatatccatatcgtctttaatatcgtcgttccctgttaaatctgctaaaatttctactactgtattttctacgtccatgattaaatcgctcctttagtgtgtaggtcttagtggaaccataaccggtccaaaaagcctgagaaaattagaaaactgagacaaacggtgttaaacgttgcaaaaattgctaagtagttcgtccaccgattgctgataatgtgatccttgtgtttcttcttgaaacgcaaccagacatcggtaaggatgatccagatagcgtggaacaagccgtaaacaatgtagtaccatgttaacccatgccagaagcccatcaataagaagagtgttaaatagccgagattggcaatgaggaccttgttcttggtaatcttatgtttcatcaagaagaacactaagcgcatgtagatgtaatctctaaaccagaatgataatgtcatatgccatctattccagaattccttgatattggttgatgcaaatggcttgttaaagttaattggcgtttcaacacccatcacataacttgtcgcaacagcgaataaactgtagcccgcaaaatcgaagaataaatacatactgtaaacatacatgtaaccaacaagcccccatgagatatcaaggaacccaccgcgactcgccattgctaaatgcgcaactttagggagtaacacggtcccgaataagtaaccgagcataaacttatacacaaagcccaacatgaagttgtggactgccttgcccagtaagtcgagataatggtcacgatcaggaacttttaggtaatcttttttgaaacgacgataacggtcaattggtcctgatgaaatcgtcgggaaaaatagcataaattgtaagaataaccatggttcaaatttcttaatactgccatcacgggtttccataatcatcccaactgacttaaatgtcagataactgatccccaagaagccaagaattgaattactacccggatttaagaatggcacgaacttgacaatcactagcggcataatcgctaagataacagccagatcgaatagccaggtgttgttgtgcttttgacgatagacagtgtatccccaaatcagtgctccttcgaacaggacataaccaatcaaggcaattccctggtgaaccttatccccgtcaaagattaggatcaaaaagagcagtgagacaagtgtctcataaacatgccaacgtttgccgttaagtaagccaatcactaacggaattaacgccgcacctagaatgagaaagtagttcggattcgcgtacggttgtaaattaagcattgccattaacctctttaatcaacgctttacgatcaatcttcccattgacggataatggtaatttttcttgataaacaaatcgttgcggaatcatatagtccatcgtattttcagcgagttctgcttttaacgtcttcgttaaatcattgcccgcttcttgaccgtctgctggcacaacataggcaatcaattgggtgacttgatgggctttgttgtagcgcggtacagtacatgcttgatgaacggctgctaattggcttaagtgatgatcgatttcctctagttcaatccggtaaccgtgcatcttaacttggaagtcggtccgccctttataaaagagcaagccatcttcgttttgggtgaccaaatcgcctgaatggtagaaacgttgcccgtctttttcgaagaaggctgcagctgttttttcaggattattcaagtacccttttgaaacacttgggccactgattaagagttcaccaggttggccaactgcgactggattattttgttcgtccactacgacagtttgagtatcagcctttgtgtagccgattggtagtcggtcgtaagtcgctaagacctccgccgtaatttcgatgctggtcatcgcaaccgttgcttcggttggaccgtaagtattgaagatttgcgcatcaccgaaacgttcgattaacttcgttgctgtttgatgcgttaattcttccccacagaagacgaattgttttaattctgggaaatgttcactatcaaatgttggtgataataagcagatttctgcaaaagatggtgttgaaacccattcgttcaccttaagagttggcaagacttcaaataacgtcttgaagttgtccgtcacagctttttctaaaacgacgagggttgcacctgagcataacccgggaaataaatccatgactgataaatcgaatgagtatggggcctgaattagaacgcggctgttatccgcaacgttgaaagctgggttggcccagtcaacgaaactttgtaaattgctttcgctgatttggacgcctttaggtaaccctgttgtccctgacgtgaagatgatgtagaaattctcattcccttgcacactttggctagcatcataatcggttgctccgtttgcaatcacatctgtcaattgggtttctgcgaaaacgggcatattaacatcaattgttgtttcactagcccatgataggacagcagccggcgttgcgactgattcaatctgtttaatccgcgctggatctgaatgttgttccactggaatataagaatggcctgctttaacagcacctagaaaagttgccaccatctcgaagttttgaccaccgaagataatcaccggtgctttagctggcaagtcttggctttgaatgaaatgagcaatccggtctgaagcagcctttaagtcggcgtaagtgtgttgcgccgtgcctaattgataagccacagtttgtggttggtcaattgcaattgcatcaatttgttgaatgatattctttttcattttaacgacgctccttcattagaattcattgtagataaatttaggactaccgataccactgtaatcatataaataaagtagaattagcagaataacaaaataaattatggttttgccaatgaaattgacggccggtttattccaaaaattaagtattttttgacccattttttcaccatctctttctctctctttttgattttcatcattttgttcatcattaaagttaccacaacgtttattaaacaaccactaacatttttgtcacacgctgtcacataaaaaaagcacctactgaatagtaggtgttttcataattagtcggtatattgtgccaaaatcgtttctagttgttccttattatggaagccagtaattttttcaacaacttgaccatcttttttaaccactaacgttggaatcgccataattccgaaattagcaggcgtttctggattagcatccacatccattttactgaacttaactttgtcgttagtttctgccaatgattcgataacaggtgattgcatccgacaaggaccacaccaagttgcccagaagtctgtcaagacaacgccactctttgtttcttcttcgtaatttttatctgtcaatacttcaaccattattcttcgccctccattcaattgtacaaaacatattattttttataatactcctatatggcgtaaataacaacttaactcgcttattattcgttacaaacggactatttcatccccgtttaatttaacaagcctaaaaaaacactcccactcaaaaccagaaaggactggttggattgggggcgtaaacgtgctccagcaggcatactcctccggttagctacaccagccacacgaccaacaagttggtcattcggctgcctatgctaatcctcggcgtataactgcctgcttccgcactctatttgaatgttacgattgttgcgccattaccgcctgcgtttgctggggcgtattcgtattttttgacttggcgattgccttttaggtagtcctggacaccttggcggattgcaccggtgccttttccatggacgattgtcacttgttggtagttcgctaacaaggccgcatcgacatattgatcgacttcagccattgcttcttcgtagcgtttgccccgcaaatcaagttgggctttaacatgccgcgctccaccgctgttgacagttgtcacgtgtcgttgaggtcgattatcttcaacgactttttgtttctcgaggtcttcattagcaatcttcatcttgataatgcccatttgaacttcccagttcttggcatcgatttgccggactaatgtcccacgttgaccgtatgaagtaactaaaacatcatcgccttctttaagggtttgacgtcgttttgcccgttgcaatactttgtttttcttcaaggttgtttcttggtgcaattgccctaattccgacttcgcatcgattaattgattttccttaatctgggcgccttgattcatctgcatatcccgcaacttggtgatcactttgtctgctttaacttcagctttttcgacgattgcattcgctttttctttcgccttcgtcatttctgtttcacggtcttcgaagaattgttgataagcgttggataactgttgatgtaaatcagtggcttctgataattcatggcgcaaggcttggtattccgtttcggctgccttacgttgattttcgagatcggtaatcatattgtttaaatcttggctttcatcgttcatcaattgtttggcttgttggacgattgtacttggtaaaccaagtcgtgttgaaatatcgaacgcattactacgaccaggcaccccaattaataaacggtacgttggttgtaaggtagcaatatcgaattccatgctagcattaatcgtttgtggccgattgtaaccgtaaattttcaattctggataatgggttgaagcaacgacatcagcgccaacaatcccaatttgatccaagatagcgatggctaaagccgccccttcttgtggatcagtccctgcccccaattcatcgagcaagaccaaactacgatcatcgatatgttgaagaatctgaatgatattttccatgtgcgctgagaacgtactcaagttctgttcaattgattgttcatcaccaatatcagcaaaaatatccgagaagacgccgacttggctctcttcacgcgcagtgataaataaaccagattgtgccatcacttggactaagcccaatgttttcaacgtgatggttttcccaccggtattgggacccgtaacaacgatggcctgataatccgccccaatcgcgatgtcattagcaacgactttagctgggtcgattaatgggtgccgtgcttgtttgagttcaacatggttttctaaattaatcagcggttcagtggccttcaacgctttagcaagttgagccttagcattgacaaaatcgagttgccccaataattcagcgttggctaaaatattgtggcgttctggcatgatggcttccgataattccgccaaaatccgttcaatttcttgttgttcttcaatttgtaattggcgcaagcggttattcaattccatgagggcttgtggttccatgaaaagggtctgaccactagcactctgatcatgcacaacgccgccgaattggccacggtattcttgcttaacaggaatgacatagcggtcattccgaatcgtgacaatcgaatcactcagatatttagctttagcaccatgtgtataacttgccatccgcgatctgatttggccttccaattgttttaaactagtccgtaagccacgcaacttggttgaagccgtgtctaaaacggcgccatcatcagcaacagaacttctaatcttttcagttagttgcggtaaagtcaccaattgggcaactaagtctggcaacgcctttaaggttaattcatctttttctaagtcatcaaagaaacgcacaaccgcagaagtcgcacgtaaaacccgcccaacttgcgcgagttcggtaccgtttaaagtcgcaccgatttcgattcgtttcaggtgcggacgaatattatctaactgtggcaaaggaatgccaccttttagccgttcaatatcgaccccatctttggtctggtccaagcgttcttgaatcaattccgcatcgttagcgggggttaattgtgtgatttgttcttgaccaaacgccgtgatggcatggccttgaagcatttgtttaattttatcgtattctagtgtttgtaatattttatgattcatttaagttagctccttctaaaaaaggggcgacttccgtcagccccaactgcactatccattttagccagcaatccaccagctcgtcacttgagaggtgaggactggtgtgtgtaagacaatgacgcgcgcaactgtcgagttttccaatgtcttctgtaagccatcgactggcactaaagccagcacgtagaggagcaaaaagagccccacgtaaacgaccaagaaactcaaaagtccaccggctaccttgttaaattgcttcaaacctggcatataagtcaatgaattcaacaatagtccgatgaagcgcaccaacaagccaccgataaacatcacgaggacaaaggcgacgccgatataaaacgcatcatcgagtgataacccgatactcttttggaaaaatgcaaaatagctgtcttcagttgccgatgggtatggcaccattaaacttagcttaggccctagtgtttggctcatcgctttggcaatccaaaagacgataaagtagccaatcgtgtagacggcttgcatgataaacccccgtctgacccctgtgtaaatggcatataacagcattaagataataattagacttaacatgagttccccttagatacgcgttttgtggcgcggatgtgtgtatgattgattggataaagtattctgaaacgtgctccataagccatcttcttccggttagctacgcctcgcaaacaatcgacttcgtcgcttattcacgagtctatgctaatcctcagaagatacccagcttattgcgcactctgatttttgaaacgtgctcttgcaggcatatttctgcgcttaaccaaatttgccaaatcggcgattgcatcgccaattcgtcaaatccagttaatactcaaaatataaccgcctgctgtcgcactctttttttaacgtactcctgcagatatactcttccggttagtttcataccgcaaacgatcggccttgccggtcattcacggtatgcaactaaccctcagagtatgaccatctgcagtcgcactctaattttatttgctagttcaactgaactattttatcatgaaataagggaaagtggcaattttactccgaatctcttcatttgccactcattaaggagccaatcgtatgcaagcagtcattaaagtgacaccctcacaattaactactattcaaaaaaattatccaaccaaccgtcaactaccgccgggggccgtttttgcgcaccaagccaatggactaagcattaccggctataaatctggcaaagtacttttccaaggcgctagtgccgaacgagaagctgctaagtggggcaccgctacccctagcaaagcaaaatctgctagccgtactaagcctaaagccgccaaaggcgatgttttaccagctgattttgccaaatggtccgttttaggctcagatgaagttggtaacggaagctacttcggtccgctgaccatcgccgccgtctatgtcagccaagaaaatctggcgttcgtcaatagtctaggcgtcgcggattccaaaacgctaaccgatgcacaaatcgatcagatggcaatcaagatgatggctaaactcccctatcacatcgtcaacatcatgccaccgaaatacaatgaagtacacgccacaatgaacatcgaaaaaatgaaggccatcagccataatttcgcactcctcaaagtcctccaaaaaatccaacccgaaaaacccgctggcatcctcattgatcaattcgaaccacgcggcatttactacaactatttgaagaatgaaccggttgttttacgcgagaacgtttatttctcaaccaaggcggaacaatttcacctcgccgttgctgccgcttcaatcattgcgcgccaccaagccaacctatcaatgcttgaactgtctaaaaaagcgggccgccaaattccgctcggcaatcatcaagcagttaaccaaatcgccgcagatttactcgcacaaggtggcatcgattacctaggcgaattcgctaaattgcattttattaacacggaaaaagcgaaaaaattattatagagtgcgtttaaagcgggttgactctgagcattagcacagtgttgtgaatgaccgacaaagtcggtcgtttgcaatacgaagctaagcacaagagtcagctttaaaaagcacgtttcaacccacaccttctccacataaaaaaagggtcccgactgcaatttaattaattgctatcgggaccctttttgaaatagatggtgataacgtgctttcatcaacaacttcctgtgctttgctacacttatcaaatcggcgattgcatcgccaattcgctaagttaggcaaatgctcagaagttccccgttgatgacgcacttcttttctttaacgtgcttttcaaaccatacttctgcggctagctacgtcccgcaaacgatcgacttcgtcgctcattcacgggactatgctagtcctcaaagtataaccggtttgaacgcacttatttcatgttgtcgtctgccaaaaatgtgtttagtacttcttcaaccatttcccattcttcgtcgtcttcgattgggaataggtcacctttgctggcatcgcctgcatcgtctgatgtgaatgagaaagcttggatatcaacttcttcatcttctccagcgcttgttgggtacaatagcacgtatgatttaccgtaatcttctgaatcaaatgtaaagagcacttggtataattcctcgttaccttggtcgtcgattagtgtaatttgttgttcttcatcttggtggatgttcttgttatcttcagtcattcatcaaaactccttaattgttttatttattagccttgtgttaagcgaccgtgcgcgtccaagtagttctgcaaaatcatcaccgcagcaagcttatcaatcacttgcttccgtttcttacgtgacgtatctgcttgttccactaacatgcgttcagcctgaaccgttgttaggcgttcatcgatgtaatcaaccggaatctctgggaaaagttcactcagcattgccccgtattcttgcgctttaagcgcccgtggcccaatcgaattattcatattcttgggtaaccccaaaacaaaaccagtcacttgatgttctgcaaccaattccttgacgcggtctaacccaaattctgattcatcttcattgatgcgaataatctcgaccccttgagctgtccagcccaatagatcactaatcgcaatgccaaccgttcttgatcctacatcaaatcccattaagcgcattatttcgtcgtttccttatccaaataatttttaactaattcctcgataatctcatcacgttcgtgcttgcgaattaaattacgagcatcattatagcgcggaatgtatgctggatcaccggacaacagataacctacaatctgattaattgggttgtagcccttctcttctaatgtctgatagaccgtcgttaatgtttcatgaacattcttggggctatttttaccaaaatcaaaatggactgttttatctagattcatctctcaacacctcaacttttcgctacttatacaaccatattctactcgaaaacaggacaaagtacaactctcccctctcttagcagaatgcggatgagagataactataacacatttcgctaaattgattaacaaaaagaacaaaaaaataacgggattgcaatcaataaaaaattgacgacaatcccgttataagttaagcgttcgctaaagctgttttagcagctgccaaagcatctgcgatcccagctggattcttcccaccagcttgggccatgtctggacggccaccaccgccaccaccaacgagtggtgcgatttgtttaatcaaatcaccggctttaatccccgctttaatcgcatcaggtgcgaccgcgacaatcaagctaaccttatctcccgcaactgttgcgagcactaagacatctgaaatttgtttttgttgccattgatccgctaattgtcgtaattcgttcattccggcaacttttgcatcagcagccactaagcgccattgaccaactgtttcgacattttcaaaaacattgccagcttgttgttgggcaaattttgctttgagttgttcgttttctttttgttctgcttttaagtcagattgtaattgttgaatcttcttaggtaaatccttggtttgagcaactttcaattcaccagctaattcatttaacaaggcttgtttgtcattcaaatacttgaaggctgcctttgaagtcacggcttcaatccggcgcgtcccggcaccaatcccagattcgctcgtaatcttgaatagaccaagatcagcagtgttagcagcatgcgtcccaccacaaagttccattgagtaatcaccgatttgaaccactcggactgtcttaccatatttttcggtaaagagtgcgatggcccccatttgtttagctgtttcaatatcggtttcaacagtattcacaggtagtgcagcccaaattttttcgttcacaattttttccacagtggctaattgatctggtgtgacttgaccgaggttcgtaaaatcaaaccgtaagtagtcaggttcaaccaatgaaccagcttgatgcgtatgttcgcctaaaacatcacgcaaggcttgatccaataaatgcgttgcggtgtgattcttaatgacgccaccgcggaaggttggatcaactgataagacatagtggacaccactaatcatttcttcgagcacttcaacggtgtgtaatggttgcccgtttggtgcgtattgcacgtcagtcactttagcgactacttgcccagctaggttcttaatgatcccttgatcagcaacttggccccccatttcagcatagaatggtgtttggtcgaagattaattgcgccgtaccactcttaatcgtttgttgttcggcattatcttgtaagatgacgcttaacttactttctgtttcaagcgttgtataaccagtgaaggtactttccactttgatatccattaaaagttcgttttgcatccccattgattgttcatcactacgggcattacgtgcacgtgatttttgttgtgccatttcactttcgaaaccagcttgatcaaccgttaagccttcatcttcggcatattcagttgtcaattcgattgggaaaccatacgtatcaaataacttgaaagcatctgccccagcaatttcactttgaccagtagctttgacactgtcaatcgtttggttcaataaacgtaaaccatcattcaaggtttcacggaaacgatcttcttcagaacggatgactttttcgatgaattctttttgtgctaatacgtctgggtaatagcttttcatgatttcaccaacgattggtactaacttgtacatgaaagcgtcgttgatgccgagtttcttaccatttaagatggcccgacgaattaaacggcggagtacatagccgcgaccttcattggccggcattgcaccgtcaccaattgcaaacgtcacagcccgcgcatgatctgcgataatcttgaatgaaatatcatcagctgcattttgaccgtattgtttgtggtcactcatcttagctgtcgcttcgatcaatggcatgaataaatctgtttcaaagttggttggggcttcttgaatcactgaaacaagtcgttcgaggcccatccccgtatcaatgttcttgtggggttgttcaacatattcgccgtttggtaaatggttgaattctgagaacacgatgttccaaacttccagataacgttcgttttcgccaccaggatagttttcaggatcatcttcgctaacgttgttgaagctttgaccacgatcgtagaaaatttctgaatcagggccacaggggccttcaccgatatcccagaaattatcttcaacttcaatgatgtgtgattctggcaaaccgactttttcatgccaaatccggtgcgcatcttgatctttaggataaaccgtcacgtataatttttcaggatcgaaaccaatccacttgtcgctggttaagaattcccaagcccatggaatcgcatcttctttgaaatagtccccgacagaaaagttgccgagcatttcgaagaaagtatggtgacgagcagtcttcccaacattttcaatatcgttggtccgaatactcttttgtgcattggtaatccgtggattattaggtacaacgcgaccatcgaaatacttctttagggtcgcaacccctgagttaatccataataatgtcggatcatcatctgggacaagcgatgcacttggttcgacatcatgacccttttctttaaagaaatctaagaacatttggcgcacttgcgcactggttagttttttcatcatgtttgctccttcaaaaaaataaaacaccgctgcaatttcaaggacgcaaaagcgcggtaccaccttgattgcaacgatgttagtcgttaacctctttatgagtttattgaattgtttgtgatgttggggagcacgtcaaccaatggcggcaccttctctcagtctagaaaggcgttcctgtctccgtcagttcgttgcgtatatcccaacacttccaaagtataaaaaagatttgctgaattgtcaactaatccaaggtaacggtaatcgcaggccgatagtagcactgaagcgtcggattgcccaatgccgccgtttgaatcccagattcataggcgggtgcttcaggcaaccattgttccaaactataccgtccccctgtcacacaagcaccacccttataaacaagtggatcttgagtaagttcataaccgtcagcggctgttgcttgtaacccaaatggcatctgctggcgctgagtcggtcgtggtaagtgattaccacttaaccacaacgtcttactccctgcacctttaagccattcatactgatcaacactcaccagatcaaaaccgcgccgccgcaatgtctggcgtagttcactttcatcaccattagttttttcaaacacttggtaacaatctggtcgcccacccgcttgtaaaattaggtgcgcactttcaagtgtttcagctgaattttgttcccgccgcgcccgaaacaaggtattttggatttccgccaaaaactgacgcccaactagttggtttccattaaaacgtcctgttgtcgtttcatactcgccttggagtacccactcacttgaaattggtgtttgtgccactaacatcggtgccatattaacaatccgatattctgatgtcatctgatcaacgtattgatcgacatccgcttgcgtcgcccaaacgagtccttgatcaactggtaacgtatgtttagtttgtgcaaaccactcactcggtgctaagtgggctgcccctgcttgccatcccaactgcaccttagcttggccggggataaaaataaactgctgcccagctagccgggcactgtaagtttgaaatacttgagtgccaatcgttgcggtctcactctgaatcgcttcaattggaatcagcgggctaacaaagtagcgcaacacctggccaaaattagcgcgccgtgcttcttcggataacgataaccagttcagtaattgtaagtcattttcatgcatcacagccacctcgattatgaattaactagctattttgcttcttgttttgacgtttcttttcacgtaattcaagtcgttgttcaatccggcgtttcttttgtgcatcttgtttaatggctgctttaatctttttcttataaccgggtttgcgtttaagtttggcctttttgaccatccctttcatgccgacatctaattcatgcgtggtagctacccgttttttacgacggttccgatcatatgatgtgaccaattcgccatctttaaatgtctttggtgtgaacttgatgcccattgcttcaatttgtgcaacggcttgttcatcatctggaccataaagcgtaatcgcggttcctttaagaccattccgaccagtccgaccaacccggtgaatgaagaattctaaatcttcacgtgggacttcagcattaatgaccatgctaatcccttcgatatcaataccgcgggccgctaaatcagttgccacaacatattgatagtctaagttatgaatttctttcataatccgtttacgttggcgtggtggaatatcgccatgaattttagcgactttcaagccttgtgattgtaaataacggtggatgtcatcaaccttgctcttcgtattagcgaaaaccaagaccatgaaaggatggcccatcgtcaataatgaataaatggtttggttgagggctttccccttcgttggcactaaccagttgtcgattgttgggctaatcacagtttcgtttttaacttcttcaatcacaggattgtgcatgtatttttgtaagaagggttgtaacttatcaggaatggttgctgagaagaccatcatttgtaagtcttctggcaaacgactagcgatgtcatcaactggcttcaaaaagcccatgtcaagtgtcatatccgcttcatcgatgaccaagatcttcgctgtataaatcttaagcgccttgctcttgattaaatctaaaattcgaccaggagtcccaatcacaatctgtggttgatgttgttcgagtttttcgatttggcgttgcttgtcagtcccaccaacataacgaccaatccgaatatcccccgtcatgtgttgagtgattaattcggcagccgtatagatttggtaagccaattcgcgacttggggctgtgatgacgatttgaacttcgtctttttcaggcaccagtttatttaaaaggggtaataagaacgcgtgggttttcccactccccgtttgtgattgaccgataacacttttaccagcgttgatggctggaatcacacgccgttgaaccgccgtgggttttgtaaagtgcatgtcgtctaaagccgcaatgatttcgggttttagattaaattgtgtaaattgattatccataaagtcctgctttctattgtttgaatccggtaaatctggatctgcgtctattcagtgtactgcgcggctagcgctgataattctgcaataattatgtcgatttcagcttgatcagctgccttagcgccactagcgagtggatgaccaccgccatcatgttgcttcgctagttcattaatgattgggccctttgagcggaaatgcacgcggtaagtgtcatctgcttgttgcacgaagatgacccacgttaatacccctttcaaacgaccgggtgttccaacaatcgagtgtacttgttgcggttcaacatgtaaccggtcctgggttgcgcgatcaaccactaagtaggcgacttgttggtcgttcacttgaagttgatcgaataagtacccttgtaatttggcttgttccaacgtgatttcgttcatcttttgattgagcttatcatggtgaatatcaaacgtcatcatttgggcggcacattccatggtatgtggactggttgaattaaacatgaagcgtcccgtatcaccaacaatcccggcatataaaacacgcgcagctgcttgattgaattgtaagtggccttcgctgttattgacgatgtcaataatgatttctgaggtacttgaggcatcaggtaacgcccagtttaaatccccataaggatcatcgttgggatgatgatcaattttgattaattcagcgcctaagttaaacgtctcaccactaatccgaggtgagttggctgtatcagtcacaatcactaatgcaccttgataagcagccggttcaatttcttgaacgtttgcgagccatgccaagttaccggtgtcgctcccgacttggtaaatcgtcttgtctgggtagctgttacgcagtacttcagctaagccaacttgtgagccaatcgcatcaggatcaggattgacatgacgatggatgataatcgtatcgtaagtttcaattttagcaataatttgttctggagttgtcatttattaacctctttctaagagttgaccagtgacgagggccttagccacaatcacatgattggcgtaaacatcgacatcgattttagctgaacgccgtccaatttcgagcaagcgtggtaaaatctgaatctgcgtgtcgatttgaatcaaccgtaaataatggaggttgatctgttcaatcattgaatagcgctgatgttgcgtctggagcatttgttgacaagctgccgaaaccgcttcggtcagtacaccaaacgaaattgtccctaagttattcgtcatctggggcgtcacttcatattcatatgccgccgtataaaagtctgggacagtttcactaggacgcagtggttcgacaatctgatcataaaacgtctcggcgacttgcggttggcgttgcgccgtttgcatgttgctcatgacatcttgccgggtaattaacccttctagttctaaattgtccgccaccactggcatcacttctaaactattccaagtcattgaatggccgacactggcaacactcatgtattttttaacgctcgcgggttccttggtcatgactttatccaaggtcatcgtggccggtttatctaaaatatccttcaccgtcacaatcccaacgaggcgcatatgttcgttgacgactggaaaacgcgattgttttaccgccgcactcaattgcttgtagtcggccaccgtttgattagcatgtaacgtgtggatttcagcaagtgggtggtagatatcagccaccgttgtgatttcttttttaatcaattgatcggtcaacgcccgattaatcaatgccgccaccgaataggtatcgtaggcagtttgcaaaatcggtaaagccaagtcgttggccaatgcaatgacgtccgccgaagtgccaaaaccgccggtaatcaaaacagcggccccgttttcaagtgctaaacgttgcacatccgtccgatcaccaacaatcatcaatgactttggcgtaatgtagcgcgtgatggcatcgatttgcatcgcgccaatcacaaatttgtccaacaacttgtctaaaccagcgcggccaccaaggacctcgccgtcaatcacttgaacgatttcttcaaaggtcagattttcaatcttcccctttaacttctgttcaatgcggatggtaccgacccgttcaattgtgctgaccaggccgttattttctgccgctttaattgcgcgataagccgttccttcacttaccgagagtgttttggcaattgagcgcaccgaaatcttgtcaccaatcggtaaattttcgatgtacattaaaatttgatcatgcttagttgccactcaacgccaccaccctttatcagatttacatagttattaatagtatatcggttttagcgcacaaaaacaaaggaaactcaactattcacgctcccaatcgtataacggtaacgtgatgttttcaaatgtttgcggtgccaagttagtcaccgtaatcccgagcaagcgcacgccatcttctgcatggccgatggtttgccaaatttcccaagcgatcgcctcgagttcagctgccttgccgacatattcgttaaatgttttacgcttagtaatagtttcaaattggcgattccgcacttttaaaacaactgtcaaaccgtgtttttgattcttgcgtaaacgccgttcaagttcaatcgctaacttcttcaactcaacttgcacctgctcttcactgattaggggttgcccgtaagtattctcattgccaattgatttgcgttcacgttggtaggcgaccgggcgattatcgatgccgcgcacgtgccgatataagccgtagccaagcttgccgaaattttgcatcagcatcatttctgattgttcaagcaagtccgcccccgttaaaatcccgagttcttgcattcgcggcgccgttttcttaccgaccccacggaatttttcaattggcaagcgacttaaaaaggcaatcgcttgttccggcaaaacgagtgtccgccccgctggcttgcggtaatccgatgccatctttgctaagaatttattgtacgaaatccccgccgagctgacgagttgggtttctttaaggatttctttttgaatgtaggcgaccacatcaattgtgtgtgccaagccgagtttattttccgtgacatcaaggtacgcttcatcaaaagcaatcggttcaatcttatcggttaccgtatgaaaaatcgtgtgaatctgttccgagaccgattgataaagcggaaaattgggcgccttaaaaacggcttggtgattcggaatcagttcagctgctttttgcgcactcatcgccgagtgcacaccgtattgtcgggcaacatagttcgcggtcgtcacgacccctttgccaccagtatcactcggattacgggcaatcacgaggggcttttggcgtaagtcgggctgttcacgctcttcaatcgatgcgtaaaacgcgtccatatcaatgtgaataattttgcgactcgtatcattttctaatggaatcttgaacagctctgccatgttacccctccttaattttttcaacatgctttttcaggcacattgttccgcttttgacgcacttcttcctttaacgtgcttttaattcgtaaccttctgtgctttgctacatcagccaaataatcgcccttggcgcttatccgtctgactaggcaaatgctcaaaggctaaccgcgaattaacgcacttcttcctttaacgtgcttttatcaacaacttcttccgctttacctcacttgccaaatcggcgattccgtcgccaattcgtcaagtgctgtaaatgctcagaagttacccgttgatgacgtacttctttcaataagaaaagcctggcatgagcatctcatacacagactttgctgacttgtttaatttaattattttgagtgggatcaaaaatccattcggcccctgttgttgccagtaaatctgttgcttctttaggccccattgaaccgattgagtaacctggtagtggcgtttgatccgcatcccagacttcacgaatcgcatcgacaaattgccatgaagcggctaattcatgccaatgtgtgaagttcgtgccatccccattgagcgcttctaaaatcaaacgttcataagcttctggactgtcagccaacatctgttcatcatattggtaagccaattgatcaggtttcaaggcgaatccttgaccgacttctttaccattaatcgttaatgaaaagccttgttccggttcgacatagattgttaagacatcaggtgccattgctgaacaatctgacttatcatcagcaaaaatattgacgccagtcttcttgaagacgatattgatttgcgtttctttacgtgccaatcgtttaccggtccggacgtaaaatggtacgccacaccaccgttcgttatcaatcatcactttcccagcgacaaatgtttcggtttgtgaatcaggcgcaacgttggtttcttgttgataccccggcttgttttcgccatccaccgatgtttcagcatattgggcgcgcacaaagttttgtttgatttctgctggtgagtaaggttgaatacttctgaaaagacgtgttttttcacgttgcacatcttctgccgtaaagttaaccggcacttccattgcaagcattccgatcacttgcatgatatggttttggaacatatcgcgcaaggcccccgatgtttcgtaatagccagcgcgttcttcaacccctactgattcagccaacgtaatttggacgttatcaatgaattgattattccatacaccactcaatagaccgttcccaaaacgcaaagcaacgatattttgaatcatctctttaccaaggtagtgatcaatccggtagatttggtcttcatcaaaggtttgcgtcaattcttggttaagcgccttagcactttcataatcgcgaccaaatggtttttcgataatcaaccggttaaagccatccgccgttaggagcgcttctgatccgagatgacttgcgattgtcccgaagaaccgtggtgacatggccatgtaataaatccgattttggtgtaattcgtattgttcatccaactgacttgctaaagcctttaatgtttcgtagtgcttggcgtccgtcacatcatgtgattgataatagaaatgacctacgaaagcttctttagttgcttgatcttcatcaaagttgtccaaagctgtcatgacgatttcgtgataatgatcatccgtccatggccgccgtgctgttccaatgacagcgaagtgttcttttaaataacccttccggtataaattaaataatgcggggtataatttccgttgggctaagtccccggaaccaccaaaaataataaagagtgctgctaaatctgtgtgcatatctcacaccactttcatataaattaattttgtggcgtcacaaagatgtgttgtgccgctttgaggccgatttggatttctgtttgactcgtattattaaaaacagtcaacggactttcgaagaggccaaccttttggagcgtcacactgtcaccgactgacaagccgatttccagtgtatattttaataagtcattatcatccaatacgcgatcgataatcgccgtttcacccacttgtaatgtttcaagtgcgatgtgactttgttgttcgaattcccccttggcattgggtataatcccaccatgcgggcaacgcgttggatgccccaagaaatcagctaaccgttcagccaagtcgtgattagtaacatgttcgagttgttctgcttctgggtgcaccgtattgaattgataatgtaacttgtcgactaaaaaaacttcccataaccgatgattgcgcactaatagggctgcttcgcgggcgccttcacttgttagttgaatcccttggtaaggtgtgtggttgacgtagttttccttcactaacttattgaccatttccgtgactgatgccgccgaaacgttcaatcccgctagtatttccttattggtaactttctttgcgtcgccaccaagttcaaaaataatttttaaatagtcttctttattgggtgtcattgccatccagatccttaatcaagtttgtcgacaaacttttcttagttatccctgaactaaatgaatgtctactttctattatgccttatttgtaataattttcataccatcaagcttcaatttagtcccttaaatagtaaaaaattaatctcttttcagcaacaaaaaaaggcggtagaccgatttgtttcagtctaccgccttaaatttgtggtcgggcttctcaaaccacttattctagcaaatcacttggtcaatttgctagaattctgcttcgagaatccctttcaattctttaattaatggttcttttggattggttaccgtacagttatcttcatatgccagttctgctaaatcatcaacgtggcgatcaaagtcggcctttgtcacgccattatcacgtaaacgcatcttgatgccgatactttccgccaatgcagtcacagcatctgcgtaagcggccaccagttcttcagtcgttttacctggtaaaccgagataacgtgcaatttcagcataatcttcatctgctctgaagtaactgtatttagcccagagtgctcgtttcgttggtgtcttagcattatagcgaatgacatgcggcattgtaatggcaatcatcaatccgtgcggcaaattgaacgcgccgcccagtttgtgcgccagtgaatggttgatacctaatagcgcattggcaaacgccattcccgccattgttgacgcatcatgcatattggctttagctgtcttatcgcccgcataactcgcttgtaagttatcaaacactaatttaatggcttgcaaactgagcccttttgtataatttgacgccatcgctgatacgtaactttcagtcgcgtggcataaaacgtccatcccagtatgcgcaaccacgcggggtggcacactttcgatgaattgactatccacaattgccacatctggtgttaacgcataatctgccaatggatatttgatgtgcgtttcactatcagtaatgaccgcaaacggcgttacttcagaacccgttccagaagtggttgggatacagattagtttcgtccgatcgaggtttgggaacttgtaagtccgtttccgaatatctaagaatttttgcttagcgccaaagaagtcggcatcttctgaatcatagaataaccacatccctttggccgcatccatgactgagcccccaccaatagcaacaattgtatcgggtttgaagcgtttcatcacttcggcgcctttataaatggtatcggttgatggatctggctcgacatcggcaaatacttggacctgcacttgatctgtgcggcgcgccaagacgtcttcaacaatttgcacgtaacctaagtcgaccatcccttgatcagcgacgataaaaaccttatgcaagtccgccattttttctaaatagttgactgaatttttttcaaaatagattttgctgggcaacttcacccattgcatgttattccggcgcttggttagcgtcttcacgttcaacaaatcgatcgttgaaacgttgtgggagattgagttatggccgtatgacccacagcctaaggttaatgatggtaacatgtcattgtataaatcaccaatcccaccttgtgctgatggtgtattcactaagacccggcatgctttcatccgttttgcaaattcgagtggtaaagcttcatccgttgtatgcaacgaagccgtatgcccaagaccaccaagatctagcattgcttcacagagttgcaagccatcttcgcgatctttagctttaatcatcgcaagtacgggtgataatttttcatgtgagagtggatattggtgtccaacacctttaatttcagcaattaaaactggcgtatcttctggaatatcgatcccagctagtttggcaattttagcagcagattggcctggaattgaaggtcggaccgcattcttatctgggtcgattactgcgtcattgagtgctgataattcgcttggtttagcgaagtaaaccccttgtgcttggaattccttcttcactgccgtataaatttcagcatcaacaattacggcttgttcagaagcacaaatcatcccgttatcaaatgatttcgagaggattaaatcattgacggcttgtttgatgttcgccgaagcttcgatatacgctggcgcattcccagccccaacccccagtgcgggtttaccagttgaataagcggctttcaccatcccaggaccaccagttgccaaaacagttgcgaccccttcatggttcattaaagcctgggtagctgcaatacttggttcttcgatatataagagtgcatctgctggcataccggctttaaccgctgcagctttaatgacattcaatgcttcagccgaacaacgttgcgcactaggatggaaagcaaagatgattggattccgcgttttaatcgcgatctcagctttaaaaatcgtcgtcgaggttggattcgtgactggtgttacaccagcaatgacaccaacgggttctgcaatcttagtgatgccatgttctggatcttcttcgatcacaccaactgttttattgtctttaatcgcattccaaatttcctcggttgcaaaaatattcttgatggctttatcttcataaatcccacggccagtttcttcaaccgccatcttagcgagtgccatatgttggtctaacccagcaatcgccatttgatggacaatattatcaatcttggcttgatcgaatgtttccaaaattgctaatgcccgttgtgcacgcgtcactaaatcggtgaccatttcattcactgtgttttcaaccgtttcaactgctgctttcttaaccatatcgattccctccatgccaattaactattgtgatttatttaacaaagttagtttagcgcattttgagttgtttgtaaactgttttgtgattataattacaaattttatttcttagttaaaggcgatttatcttttaaaagcctacttttgataataaattcactatataatgcaaataaaaaagcgctcggttgaagtattcaatcgagcgctctctgaattattttgtatcttcttttgtttcttcaaccgtttcttcttcaaccactgttgcggcttctgaagcagttggtgttactgtccggattgcactcaagttaaacttgaggtaaacgccgtcacaatctaagacaacgattttagtatctgtattaacagaatcaatcacaccgtgtagaccaccgattgtgatgactgcgtcgccttttttcatttggttcaccatttcttggtgtttttgttgttgtttcttttgtgggcgcattaccatgaaatacatcattgccatcattaaaattaagataacgaagaaactgggattaaaaccgccggcacctaacacaaagtttgccatttaaaaaacctcttttcaattttgtctattactaactctatcagacttatcaagcaacttccagtgattcactagaaattccgagtgttcttttcattgtaaccatattcttcgaagaacgcttctctgaattccaataaattatcttgttcgatggcatcttgcacttgatgcatcaaattaatcaagaagtataagttatggtaactcgtcaaatgaatcccaaacgtttcgtccgctttaatcaagtgccgaatgtaagcgcgggtgtagttcttgcagacataacaatcacacttaggatccaatgggcggaagtcttctgagtacttcgcattcttaaccactaatcggccttgtgaggtcatcgttgtcccattacgggcaatccgggttggcaacacgcaatcgaacatatcgacaccgcgaatcacaccatcgattaaggcatcaggcgaaccgacgcccatcaagtaccgtggtttgtcttcaggtaacattggtgttgtgaaatcaagcacgcgattcatttcgccttttgattcaccaactgataagccaccgattgaataaccggggaagtccatcccaactaaatcgcgcgcactttggcggcgtaagtcttcaaagccggccccttggacaatcccaaatagaccttgcgttgctgggttttgatgcgcaatcaagccccgttcagcccaacgtgatgtccgttcaactgattttttaacgtagtcataactttcaaagaatggtggacattcatcgaaactcatcatgatatcggcacccaaagcattttcgacttggattgctttttccggtgataagaacagtttttcgccgctcaaatgactcttgaaagcaaccccttcttcactgatatcccgtaatttcgcaagtgagaacacttggaaaccaccagaatcggttaacacaccgcggtcccagttcatgaacttatgaagaccaccggctttttcaacgatgtcttccccaggtcgtaaccagagatgataggtgttcgataaaataatgccggcacccatttcttttaattcttcaggcgccattgtcttaacactggcttgggtcccaacaggcataaacatgggtgttttaaacgtgccatgtggtgtcacaatttcaccaaggcgcgccccggtatgtttttctttcttgattagacgatacttgatcgctggttccatttaatcgactccaattctaggattattgttggttcagtaataattggtacgcatagcgtttcggtgacggatcgtttgcaatgaagatgtcaccacgatattgaaagcctactttttgaatcatatgttgcatcgccaagttatcagggtgcgtatcgatgcgtaaatcatgtgcgcctcgtaaactggcagcggtcaccaataaggttaaaaactgtgtcccgagatgttggccgtggaaagcactatcaagtgcgacgcggtgaattgaaaaataaggtgtcgaaccagattgccattgaccattggtaattgctgcatagccaggatcttcagttgctagaattgaggcgaccccaatcacctgttgatcagccatcagaatgtaacataattcttggcgaatctcgtcttcaaactgagtttgattaggttcacctgcttgccattgatttatctggcgattctttaaggcggcctttgcatgttcgataatctctaaaatccgcggtaaatctgtaaacgttgcttttctcaaatacatcaatgctgccacctcatttttgtcgaattatttaacaaacatggcatcgccgaagctaaagaaacgataccgttcatcaacagcgtgttgataagcatttaagatgttttcgcgaccggtaaatgaagcgaccaacatcactaaggttgattttggtaaatggaagttcgtgatgaatgcatcaacagctttccattgataaccaggtttgataaagattgatgtccagccactatcagctttgagttcaccatcaaacttcgtcgcaattgtttctagcgtccgaatgctggttgtccccgttgccacaatgcggccaccattttgtttgacttcattcaacgttgcagcagcttcttctgttaatcggtagaattcgctgtgcattttgtgatcttccacgttgtcttctgaaacaggccggaaagttcccaacccaacatgcaacgttaagtacacgagtttgatgcctttatcctgcactttttgcaagagttcttctgtccagtggaagccagcagttggtgcggcagctgaaccaggttctttagcataaaccgtttgatacatttctggatcatctaatttttctttgatgtatggtggtaatggcatttcacctaaagcttctagaatttgcatgaagatgccgtcatacttgaattcaatcatgcggccaccatgttcgagttccttggtcacaactgcttttaattgaccatcgccaaaaacgacttcggtaccaactttggcccggcgtgctggcttcatcaagacttcccattcatcgtcatgcgtgttgtttaaaagcaagacttcttcgtggccgcccgtatcaggtttcacaccatataaacgtgctggcaagacccgtgtattattcatgacaactgcatcgccgggatttaattcatcgataatgtcgtagaaaactttatcttctagtgcgcctgttttgtgatccatcaccaataaacgagacgctgcccgttcaatcatcggtgtttgagcaattaattcttctggtaaattataatcaaaatcttctgttgaaaccattgtgtaacctctttctaattttctgaatagggaataccgagatgttcataaccagcgggcgtcacaacacgtccccgcggtgtccgttttaagaacccaatctgtaataaatacggttcgtaaacggcttcgattgtttcattttcttcaccaatattagccgcaatcgtctttagaccgactggaccgccatgataatagtcaatcatcatctggagaatcttgcggtcaatactatctaagccacgtacatcgacttgtagttgactaagcgcatggtcggcaatcgcttgatcaattgccgcttggtccgccacttgagcgtaatcgcgaatccgttttaataagcggttcgcaatccgcggcgtcccccgcgaacgacgggcaatctcatgcgcgccttcttggacaatggccatgttaaagacatctgccgagcgttcaacgatatcgaccaaatcatcttcatcatagtatgccatatgttcgacgattccgaaacgatcacgtaacggtgccgacaataaaccggcccgagtcgttgcgccaatcaaggtaaacggtggcaatgggaaatgcaccgggtgcgcagttggcccttgtccgaccacgatatcgatgtaaaaatcttccatcgccgaataaagtagttcttcgaccactctcggcaagcgatgaatttcatcgataaatagcacatcaccaggttgtaactcgttcaacaacgcgactaaatcgccaggccgttcaattgctggcccactcgtcgtccgaatctgaacatgcagttcattggcaatcaccatcgccaaggtcgtcttacctaaaccaggcgggccatataatagcacatggtccaacgactcttcccgctttttagcggcttcaatataaaccgccaactcatttttgacccggtcttgaccgatatattgcgcgaggacttgtggccgtaacgtcttttcaatacttgtttctgcgaaatcttcgttttctgcggaaacaattcgttcttctgccatccattagtcctcctttatttcttcattaataagcgtaaaccttcacgtaagtactgatccgtagtttgtgcattgaaatcagccagtgttttggtaatcgctttgacttcgcgggctgaatacccaagcgcggttaatgccgctaacgcatcgtttaattctggtgattcaccaggcgtaccaagttcgatagccgtttgaccagcgatcgtttcggtttgttccaaatcgccgagcttgccctttaaatctaagacaatttgttgggcagtctttttgccaaccccagggaacttggtcaaatagctcacatcatcattcataatcgcttggattaacccagaatgatcgctattggctaagatggccaaggcactcttaggaccaattccagaaacactgattaatttttggaaaatttgcttttcatctagatcgtaaaaaccaaataacgtgatatccgtatcacgaaccgcttgatagacataaatctgaacgatatcggtcgttgattcggtgtaacgatacggattagcaacttgcaattgatagccgacgccttgaacttctaagacgacatagtacggactaaccgccgtcaccaaaccttttaaatattcatacataaatttacctactttacgagaacgtatatttgcttgttaaattgtaacataaaatccgaatcgtgaaacagccagcagccaaaaagcgtaaaagaagggcctaagtgacccccggccaactcaaaccctagcaattagtattcacgaatcttcggcggttggtaatccttgataaaggatgccatcacactcaacgaatcggtaaataagtatttttcaaaatcgacctgtgttaaaaaaccttcactgaccatgtgggctaaaaattgttgtaacaaatcataatagcctgcgacattataaaaaatgcagggaccattttgttgcccaattcgcgcccatgaaataacttcactcatttcttccagcgtaccgggaccacccggcaatgcgataaacacatctgccagttcaatcatcttggctttacgcgctgacatcgtatcaaccttaatcatttcggttaaacctggatggacgagttcttgctgactcataaaccctggcatgacgccggtcacttgtccatcatgggctaacaccgtgtcggccacggtgcccattaaaccaacttgggcgccgccataaatcaagcgcgcattgcgcccagcaatccaagtgcctaacgccttagccgcttccgtgtagattattttattaccactactagcgccgcaataaacggcaatgttttgcgttgccattagtcagcctccttagcggttaacaaccgagccaccgtactgatgggcaagccaacaacattgtaaaagtcaccgttgattttctcaacgagcagacttccctgtccctgaataccataagcaccagccttatcccggtactcttcggtgtctaaatacgtttcaatcatttcatgacttaacggccagaacgtgacatcagtttggacaaccgttttgcggatttcaccatcaatggataaccaaacacctgtataagcttgatgcgtgctgccactcaattgccgtaacatttcggctgcatcttgacgatcatgtggcttaccgtaaatcgtaccctgaaaactgacaacagtatcagcactgagcacagtggcctgaggattcttttgggcgatggattcacccttaagttgcgccaacatctgcacgtagtcagctggtgccgtcactggtacctggcgttcatcgattgttgcgggttggacctcgaaatcaggcacgactttttgtaaaagttcgcggcgtcttggtgattgtgatgctaagataaacattattcgccctcccaactatggtgtggatcttgaatccgtttaaacattttttctaaatctttttgcgtgtaatgaattaaaaccggtcggccatgtggacagttaaacggattttccgtctgtgccagatcaaccaacaatgctttagcttgcacatcatctaagtgatggtgtgccttgattgactgtttacagctgatcataatcgccgttttttcacggaaatgggcaatgtctaacttcccgttttccaatacagtgtcaatcatctcgcgaatcgttgcttcttcttggccttgcgcaatccacgtcggatgactatggataacaaaactattttggccgaagctctctagctgcacacccactgcggcaaggagttccttttgtgcttgaatcttaatcgcatcactattgggatattccaacacaaggggcaccaataaattctgggcgtcgttgctaacttcaccaattttttcgcgatagtattcatacttaatccgttcttgagcagcatgttgatctaaaatgtaaaaaccatcttcaccttctgctaataagaatgtattgtgcagttgtccaatatagcgtaacgctgggaaacgctcaatgggtgctgcatcatcttcaggttgttcaccaaacggatttccgaccgcctctgcttcgtacttatcatcccaccgggccaattgttggggttgttcaaatatcggcaggctatttaaattaggattagcagttggttctcgtttaaggggtgtttcggtttccgcaatttgcgctgccgcttgcatttcagttttaaccggcttttcaggaactgtttggggctgaattggccgcaccgtaccagtcgcattgcgccgttgactcgtaatttggtttaaatccatttgaagctggtccacatcgaccggtttcgtttgttttagattctgcactgcatcgggaattaaattctcggtgctgagtcgctcacgaattgctttttcaatcaacgccatcaaagcaggttccttactcaagcggacttcttgcttggtcggatggacattgacatcgattaacagtggatccatttgaatatttaaaacgacgactggataacggccgaccattaattttgaaccgtaacccttgataatcgccttattcaattgataattcttgatataacgaccattaatcaacactgaaatgtaattacgactggcccgcgttagtttcggtagcgatacatagccggttaatttaaaatcgagatcttctgcactgactggcaagagttgcttagccattgtaacgccatagatcccggcaatcgtctgttgtaaatcgttattacccgccgtttttaacagcaggtgatcatcattggttaacgtgaaggcaatctgaggatgactcatcgccaagcgattgacgatatcgatcacgtttgccaattcagtctggaacgtcttcacatatttcaagcgggctggcgtgttgaagaataaatcacgaaccgtgattgccgtcccagggcgaattggattagttttctgttcttctaagacgccacctttaaaatgagcaaatgtccctaacgaatcagcggttgccgtttcaatcgtcaaatcggacactgacgcgatactggctaacgcttcaccccgaaagccaagtgactgaattttgaaaagatcctggcgcgtggcaatcttacttgtcgcgtgtcgcttaaatgcagtgggtacatcttccggttcaatcccatcgccgttatcgatgacttgaatcaattgcaaaccagcctgttcaatcacgatgtcaatttgagtactattggcgtcaatcgcattttctgccaactctttgacaactgaagctggccgctcaattacttcgcccgccgcaatttggttacttaatatttctgacagttcatgaattttccccattagcgttctcctttttctgacgtgtgggtatttagtgctaaaacgtgcttttcaagctaactttctgcgcttagcgctgtgaatcaaatcatcgactgcgtcgctaattcgcttccctgtgctaatgctcaaaagtttgataagcttgaatacactcttatccgaaatgtgctttcatcaacaacttcttccgctttaccccacttgccaaatcggcgattacatcgccaattcgtcaagtgctgtaaatgctcagaagttacccgttgatgacgcactcttatttgtttaattccttttgccatttgtatagcatgtttagcgcgtctagtggtgtggcgctcattaagtcgaattgtttaaccgccgctaggactttagctgcttttggatccgcttgtggtgccacttctggttcgaatagtgaaatttgttcatccacttcttcaaccggttcagcagccggcgcgacagctgcctttggtttatcttctaattgatccaagatgacatctgcgcggttcaacaacggtgtcggcatccccgctaatttagccacgtgaatcccgtatgacttatcagctgggccagccagcatcttgtgtaaaaaaactaactcgccattttcttcaactgccccgacgtggacgtttttcaatgcggttagtgaatccgctaagctggtcaattcgtgataatgcgttgaaaagagtgtcttggcatgcacgttgtcgtgaatgtattcaataatcgcttgggccaaggccattccatcataggtggctgttccgcgtccgatttcgtcaaagagaatcaagctattttgtgtcgcgttcataatcgcgcgattggcttccatcatttcgaccatgaaggtactttgaccggaaattaaatcatcggccgcaccaatgcgcgtaaagatctgatcaaaaatcggtaagttcgcagatttagccggtacaaaacatcccatctgcgccatgatgaccgtcaaagccagttgccgcatgtacgtactcttcccagacatattcggaccagtaattaagagcatatccgtatcggtgcccatttgaaccgcgttgggaatgtatttttggcgaccgagcactttttcaaccactggatgacgcccatccactaaatcaatttcgcgactatcagtcattaatgtcggctgaacgtagtggtagttttcactgactacggcaaaactttgtaagacatcaagggccgccacacttttagcgagggtttgaagccgttcaatctccaacttaacggtttcgcgaacttgcgtgaataactcatattcaagcgcggttgagcgttcttcggcttctaaaatcaattgttctttcgcctttaattccggtgtaatgaaccgttcggcgttggttaaggtttgtttccgttcataacgcccttcaggtagcgcgtctaaattcgcacgtgtcacttcgatatagtaaccaaacacgcgattaaagccaatttttaaattatgaatcccggtaatttcgcgttctttagcttcaagttgtgctagccattgtttcccgttagacatcgcatcgcgataatcatctaatgtttcgttgtaacccgattgaataatcccaccgtcagtcactgaaattggcgcatcgggattgatagccgtttcaatgagctcgcgtacatcatcaaccggatcgagttggtctaacgcacggtcaaaggtctgatcgtcattaatgcccgttaaaatcgttttaatcgttggaatttgttccaaggaagtcttcaactgaattaaatcgcggccattaacactgccaaatgcgacccgacctgctagccgttctaggtcatacacttttgtgagggcgtcttgcaagtttgtccgttcaaaataatggttcatgaaactagcaacttggcgttgccggttttgaatcgcctttaaatccaataatggccgttctaaccattgttttaataaccggccacccattgccgtcttggtttcatccaataaccacaataatgtcccgctcttatgaccagtgcgtaaagaagccgttaattcaaggttcatcttcgcagaatggtctaattttaaatattgggatggctcgtactcttgggcccgttgtaaatgccctaaatggcgcttttgcgtcgttgccaaatacaagaccaattgtttaatcacggccagttcaaggggctgggagatgttttgtgaaacgaaactgacttcggccgttgcatcgccatcttcttgatacgacacgagaatttgctgttgaacaaacgcgtgcacaacctcactggcaacaccgtggttaatgacaacttctttggtttgtaaactcaacatttcgttgagcaataaatccaaactcgcaatctggctgactttcatctcaccagttgataaatcggtataagcaaagccaaactgatcgccatctgccaccactgctgttaagtaattattttgtttggcatggccggctttttcatccatcatcgttcctggtgtgaccagttgaatgacttcccgcttgaccatccctttagcggttttaggatcttccatttgttcacaaatagcaaccttgtaaccttgatcgactagaatatcgatgtaattttgggctgcgtggtgtggtaccccacacattggaattggatcatccgcatttttattgcgtgctgttagtgtgagttccaataattgtgaagctttgacagcatcatcattaaagagttcgtaaaaatcaccgaggcgataaaataaaaaagcgtccggatactgatccttgaccttttgatattgcgccatcattggcgtttctttcgttttttgtggcatgttgttaatccctctctcattgacgttgatctgctgctaaggtgcttaaaattgcgtataggggtgatctggtgaaatctggattggtttaattgatttagcgtgacccgttttgtcatcaatttcaattaaacagccattcaattgacccggtccttcggtcactaattcgaaccgttctggccgttgtgttttaaaccgattaatgatcttttcgcgcttcacgcctagaatcccgttataagggccagtcatcccagcatccgttaaaacggctgtgccttcaggtaagacgcgcgcatcgtttgtttgcacatgtgtatgggtcccaactaacgctgaaatccggccatcaagataccaagcaagtgcgagtttttcactcgtcgtttcggcatgaaaatcaacgaagatacagttggtttctttactaatttcagccaccatttcatctaacatttcaaacggatcaattagtagttcattcatcaaggcgcgcccttgtaagttaatcacggctaatttggcttgattgacgttaatcattgtcatcccttgcccaggcgttcctttcggaaaattggccggccgcactaattttttagcatcgtcgatgaattctaaaatatcgcgcttattccaagtatgattgcccatcgtaatcgcatcggccccagcttgtaaaagattcttataatccttttgagtcatccccttaccatccgcgatgttttcgccgttgataatggtcacctgtggtttgtattgttgctttaatgctggtaggtaatcattgatcattttttgacccattgtgcccactgtatcaccaataaataaaattcgcatgttgcgccccttaatgttctttctcagactttgatatagcttctattgtagcaatttttgcccagaataaaaagttttgctgtacccgtagaaaaacaaaaaaagccccgcgcaccgaaaaggtgagcggggctgataatgtgcttttcaaaccatgttcctgcgtttagcctaattagccaaccaatcgacttcgtcgcttattcgtctaattttgctaatcctcagaacataatcggtttgaacacacttcttcttttaacgtgctttttgaaactgactcttgcgcttagctacaatccgcaaacgatcaactccgtcgctcattcacagatttaggctaatgctcaaagtcaaaccgtttcaaacacacttctcttttaacgtgcttttagttgcaccaacttccgcttaatctaaaattggcagtcatcccacaactcgggataactgccaattttgtattaatgctcggttgctaaacgcacttctttctttaacgcgctcctcgatcagtcttttccggttaactgcaaaatgagcatcatggcaagaaccgccacaatgcccattttactgttaatcttcaaagcctactcagatcgagtcgcacttctagtgttttaagtgataactatatgttgaaataataatgttttcgcggtttgcaaatgccgttcttagtcttagacttgattggttatgcaaaatgttttgccatggttttcttggtacgaattgtgggaccaagaccgtggttgtaaagttccgtttttgcgcattcttgctaacaatgtcaacaaagcgaacaattggtttttgaattgaccggtatgatgaatggacatcgacgaaccggacattcggaaaatcttccttaaattcagcttgaatttcacgttccttggctggattttcatccgttgagacatgcatcgcaatcacataatccccgattgattgtgcgtaatctagcgcaccacgggttacttgggtcacgttgctgaccaagacaatcacagttgaaccgtcataatcatgcaagacggcttctttagcactcacgcgtagttgaagcgccactttcttgtaatgatcatgaatcttatagaaaatccaaatcataacaggcatgatgatgaagaatggccagatatcaggtaagcgataaacgaagagaatgactaagatagcaaacgaaatcaaagcgccaacaaaattggcaattgatttaccaaaccaattctttggtcgttcgacccaccacttgcgcaacatcccagattgagaaagcgtaaatggaatgaacacaccaaccgcataaagtggaatcaagcgtgatgtatccccgttaaagatgaaaatcaatgccattgaaccaatcgccaatgtaataatcccgtttgaataacctaaacgatcgccacgatccatgtacatgtgtggcatatatttgtctttggctaaattatacgctaacactgggaaagcggagaatccagtattcgcagcgacggctaaaataaaggccgttgcaaattgcacaatatagaataaaaagcctttcccaaaggtgtgttgggccacttgtgatagaacagttactttttctgctggtacaatgccgtaccagtagtttaaaaatgtaatcccagcaaagaagaaacctaagatggctgccatgattgctaatgtttcagccgcgtttgttgcacgtggcttcttgaaaaatggtaccgcattactgatggcttcaaccccagttaatgatgatgaacctgatgagaaggctctaaaaatcaacgccatcgaaacacctggtacaacagccccaacggttgatgttgcgtggaacggaatcgcacctgtgaagatcttataacacccaacgatgatcattaaagtcatcatcaagacgaataagtaaacgggcaccattaaaaatgatgctgattcacgcatcccacgtagattcattcccatcaagatcaaaacgataatgaaggaaatccctacttgatgcccatacaatgccggaatggccgaggtgatcgcttccgcacccgcggaaatactaaccgcaacggttaacatgtaatccacaagcagtgaaccacctgccactaaaccagcatttttccccaaattttcactggaaacaacgtaggcaccaccaccacctggataggcgtggatcacttggcgatatgacaaagttaatgacaatagcaatacgagcacaaaggctgcgattggaattgaataccaaattgccgcggccgaaagggtcgtcaatacgatgacgatttcttctgtcccgtaggccactgatgacaatgcatcagaagatagcatcgctaacgctttaaagcgtcctaatttttgattaccctcatcggaagattttaacggtttcccgataaaaatccgttttaactgttgcatagcaatatgacccctttaaataatatttctaacataaaaagccctcatgtgaatatcattcgtcgcaatccacacagtgacttttgaatttctctataacttaaaaaaataattgccgtttattcaaacaaatcgtattctactatagttacgcatgaattactaccacaatttaaaaaagaactgaccaaggtaatcgaaacgcctcgattccttggtcagttcttattttttatgataaacgacgggcaaaatccggtttgtaatctgaaattttagtaattcgaactttatcgccaggttgtggtgcttggataaagtagccatccccaatgtagattgcgacatggtgggctgttccaacccctccccagaataataggtcgtttggttgtaattcattgagcggtacatctttgcctaacttactttgatcttgtgaaacacggggtaatttaatcccatttttagcgtaaacgtattgcactaagccagaacagtcaaatccttcgggtgtggtgccaccccaaacatagggtcgcctaaatatttaaccgcttcttggataatcttattattcattaaatccttgttaccagtaattaatgcggcacctgcatcactcgccgctttttgagcagccgcttgcgcctctaattctttcttgaacttcgtttgtagttgcgttaattggtcgttagcttgttgtttttgttgatctaagtccttaattgcagcatcattttcctgtgataatgataccagcttggcctgttgcgcttctaattcagtcttttgttcagctttttttcagctaatgaggccgtttcagcggcattatccgccttagcgtctaacagtcgattgatgattgaacctttttggaataaatcgctcaaactttggctcgacaataaactatcgatcatatcaagattaaaactgctatctcgtgtttgtaattgccgcaggttaccttcaataatcgccacttgcttttgataatcagcagatgttttgctgaactcgtcttgtttttctttaatatccgcctgttttgcagtcatttgttcgttcaattgcgttgtttttaacgttaaattactaatattattattcaattcggatagatgatcttgtgctgtcttaatggcagtttgcgtttcttcaggcgttgcttggaccgtttgtggtcgcgctaaaaagaagccacctaacattaaacaggttatcagtatccgccggtttcgaaaaatcattgtcaacacctccaactattattataccgcaatcaaaattaattaatagggttgcgcacaatttatatatgcgcattttttttgaaaaataaaaaagttccaaaacttttgccagttttggaactttggatttaatcgtgctttttggttataacgccttccgcttaactacaaaacgagcgttatggcaaaaaccgccataacgctcgtttttaggttaatgctcagaaccaacccgtttcaaacgcacttctttacatcataccgcccattgctgatgggtccatgcctgctgctggtgctgggttgtcttctggtttgtcagcaaccactgcttcagttgttaacattaaggccgccacactagctgcattttgtaatgctgaacgtgtcaccttagttggatctaagatgccggcttcaatcatattttcccagttgccgttggctgcattgtagccgacttcaactggttgtgatttaactttttcaacaattactgagccttcaagaccagcgttggttgcgatttgacgaacaggttcttccaatgcacgaagcacaatgttaatcccggtttgaacgtcgccttcttctttaagcgcagcaacactttcgatcacatcgattaatgctgtcccaccgccggcaacgtagccttcttcaacagctgcacgcgttgcgttcaaagcatcttcaatccgatatttttgttctttcaattctgtttctgtggcagcaccgactttaatcactgcaacgccaccagctaatttagccaagcgttcttgtaatttttcacggtcaaagtctgatgttgtttcagcaatttgtttcttgatgttttcaacccgttcagcgatggcatctttgctaccagcaccttcaacgattgttgtatcatcttttgtaacagttaccttaccagctgtccctaattgatcgatagttgtttctttcaattctagaccgaggtcacttgtaatcactgtggcacctgttaatgtggcgatatcttctaattgttccttacgacgatcaccaaaaccaggggcttttacagcaaccacgttgaatgtcccacgaatcttgttcaagacaagtgttggtaatgcttcgccatcaacatcatcagcgatgattaacaaggctttaccttcttgcacgattgattgtaaaagtggtaaaacatcttgaatatttgaaatctttttatctgtaattaagatatatgggttatctaggtcagcttccatcttatcgttatccgttaccatgtattgtgacaagtaaccacgatcgaattgcatcccttcaacaacgcttaattcagtatcaatcccttttgattcttcaactgtgatgaccccatcgttgccaactttttccattgcatcagcaattaaacgaccagtttcttcgttagctgatgaaacagcagccacttgggcaatggcatctttactttcgactttgtgtgaaatttcgtgtaacttcttaacagcttctttagttgctaattcaatcccacgacgaatcccaactgggttagcgccggctgtgacgttcttcatcccttcacgaataattgcttgagctaaaacagtagcagtagttgtcccatcaccagcgatgtcattcgtttttgaagccacttcagaaactaacttagcacccatattttcaaaatgatcttctaattcgattgctttagcgattgtcacaccatcattagtaatttctggtgaaccgtaagctttttccaaaacaacgttccggccttttggtcctaatgttgttttcactgtgttggctaattggtcaacccctgccaacatttttgaacgtgcgtcttctgaaaatttaagttcttttgccataatttattcacctcaaaaaatttttttgtttattattattcaacaatagccataatatctttagcatggagcactaaatattgttgaccttcatattcaacttctgaacctgcatatttatcgtaaataacttcatcgttttctttaatatcaagtggaatacgtttgccgtcacttgttaatgtgccggtaccaactgcgactactttgccggtttgtggtttttgtttagcattacttgccaaaacaatcccacctactgtttgttcttcttcgtctttaacggcgataatcacgcgatcttctaatggttttaacacttaaaatccctccatcaattttacttttttagcactctatcatctcaagtgctaatcacaatttttatcatagcattttttcagaacattgcaagtattatgctagcacttttgcaatttgagtgctaatacgctaagctattgtcacaacaacctttgaggagctttcacatgacgctatacaaacaaaatttttcaattatcattagctatttgttcattttattgattcctagtgcagtcgtccgttttggtcatctatctgcctcgttttttctaatcacaaccattgttgattgcctcggtgccgcctggttactctatcttaatcaacgcacacaagccaatgccattgagcagcggcctttcccactcaaacccattatcatttggggggtgtgtggcattgtactggtcttagtaattcagattctcgccggcttcattgaacaaaacattctccacatcactgccaaatcgctcaacaccatttcactgatgaccatgatgcaacaacaaccgtttcttattttagcaacgaccatcgccgcaccgattatggaagaaatcacgtttcgcaaagcaatctttggtggattagccagtcgcttaaaccgcattttagccgccatcatttcaagtttactgtttgcttttttacatcaggacgggcatttgttaatctacacggccatcggtcttttcctatgttggctgtaccgcaagacaggttcgattttcaccacaatcatcagccatgctgggatgaacctgatcgtcactttactgtatctcaatcgttaaaaaaagcgttcaaacaggcggctactacgagcaacttgtttaaacgctatttttattcttgattttgttcatcagtataattatcgaggaagtaaatcaaagtttgtagttctttagccaaatcaacattttgaatccgcacgtttgatggcacagaaattcgaattggcgtaaagttcataatccctttaatcccagcggccactaattcatcggtgacttcttgagcttcatcaattggcactgttaaaatgacaatctcgatctgttggttcttcaattgttcggccatctcgtccattgaatagacaggaacaccggtttgaattgttccaatcatttcgggtttaacatcaaatgctgcgctaatccgaatattattggtttgcttaaagttgtagttcaataaggcgtggcctaaattccccaccccaatcaatgcaacgtttgtcaatcgatcttggttcaaggtcttcttgaaaaaatctagcaacgaagcgacatcatagccataaccacgtttgcccagtgcaccgaaatatgaaaaatcacgacgaattgtcgcactatctactttaactgcttcggataattcagtagaggaaattttagttttccctgaattgttcaaaaagtttaaatagcggtaatataaaggcaatcgttttgcagttgctcttgggatattattctcaaccatttgaaacctcctttttgatttgcttgtgaaaatagtgtagtacatactgaaatcatactgaattttcttgtgaaaagcaatatatttacaattttgactgtccatcgtttaaatctgttatgatagttgacagtagtattataaaaatgaacgcaattaactttaaaaaacaccgcacgaaaggatttttagccgtgatattattacaagttcaacaagtcgcacgcagttttggcggcgattaccttttcaaaaacgcacaactcgaagtacaagaccgcgcccgtgttgccctcgttggtccaaacggggctggtaaatcaaccttattaaaaatgattgccggcatcacaacgcctgatgaaggccaaatcattcttagcaaaaatgctcaagtcggttacttagcgcaagatagtggcttagactcaacccggacaatctatgcggagatgttaaccattttcgatgatctccgccaaatggaagcccaaatgcatgaactcgagaccgcaattgcggacacaaccattgaccatgctagcgaagaatatgcagccttactaaaacgatatgaccaagtccaacacgatttctctgaagctaatggttacggctatgaagccgaaatccgtggcgtcttacatggtttccaatttccagaagacacctttgaaaagccaatcagtacactatcgggaggcgaacgctcgcgactcgcacttgctaagttattgcttgagaaaaaagacgtccttattttggacgaaccaacgaaccatttagatatcgaaacactaacatggttggaaaattatttacaaacttatcccggtgccttgctcaccgtctcgcatgaccggtacttcttagataaaatcactaaagaagtctacgacatgagtcgccacacattgacccattataccggtaattacagccatttcttaagtttaaaagaagctaacctctcacttgaatggaaggcttatgaaaaacaacaagctgaaatcgataaacttcagacctttgttgataaaaacttagtgcgcgcaagtaccacgaaacaagcccaaagtcgccgccgtcaactcgaaaagatggataaattagaccggccgcaaaacgaagccggtaaaattcattttcatttcgaaagcgaacatccaagcggtaacgaagtattgcaagtaagcgatgccgctgtcggctattcccccgataaaatcatggtacaaccaatcaattttgaagtgaaccgccacgaacgcttagccatcatcggacctaacggaattggtaaatcgacccttctcaaaagtatcttgcaccaaattccgttcatcaaaggccatgaaaaagtcggtagtaacgtttcaatgggctactacgatcaagagcaacgcaatttacacactaacaaaaccgtcctcaacgaattatgggatgaacaccatacaacacctgaaaaggaaattcgcacactacttggtagtttcttattcaccggtgacgatgttttaaaggttgtgtcacaactcagtggtggtgaaaaagcccgcttactcttgacgaaactcgcgatgaaccatgacaatttcttaatcatggatgaaccaacgaaccatttggacattgatagcaaggaagtcttggaaaaagccctccgtgaattcgatggcaccgtcctcttcatttcccatgaccggtatttcatcaatcaagtcgccactggcattatcgaactatcagatactggtagcaaacgatacctcggtgattacgattactacctcgccaagaaagctgaagaaacagcttacgcagaagcagctagccaaaacagtgcaattatccaaccaagtgcccatgcacaagatgcctacaaagcaagtaaggaaaaccaacgtgcacaacggaaactagaacgcgaagttactgctttagaagaaaaaatggccgcactagagactaaggccaacgcaatccaagaacaaatgacccaagcagacgtaattactaaacccctcatgcttcaagaactacaacaagacctagaaaaagtccaagctgaactcgctcaaacagaatcagactgggaagaacaagcgatggcattagaagaactaacacaatagagtgcgtcaaaagccggttatgctgcgagcatcagcctaacaaggcgaatgcttgctacaagcaatcgtttgacttgtgtagctaagcacagaaatatgcctgcaccacataaaaaagggtagcgatcaatatcgttgcccttttgcattttaattaatttgtttgccgaacggacttaacgataacgccgctagcttaaagtgttgccggccaaatggaatcccaataatcgtaattgataataatagcccccaaaagacatggctcgcccacatcacaagaccacctaagaaaaaccaaacaatgtttaataaaaacgaacctgcaccccccgttgaaacaacggttgcgttaaacggcatcaaggtcaatgcgccaataaaacgttgtagcccgactggaattccaataatcgtaatactccaggcaatccccagaataaaccaaccgatagcctctactaatcccccgaatagccaccaaattaatgtaccaattaaactcattgaataaactcctttatacttgattgccttaattatacctgattcataaacaaaaaaagcggtagccgcctaaaaataggtcgctaccgcttttcttaatctttttttaaccgattaatgctaacgcttgtttcaagacagtttcgccgtccatcatgccgtaagccttcatatcaattacttcaacaccgattccttttggtgccaatttttctttaaattgaccttccatgaaacgaacttgagggcctaatagtacgcagtcaatttttttagattcgagttggttgtctgcatctgaagcgccagttgcaaaaatttctgcgtctaagccttgtgcttcagcggccttttgcatctttgaaactaataaacttgttgacatccctgctgcacaacataacatgattgttttttctgccataatgaattaccccttaaattttaattgattagaaaacgacaaaaggcttataaaaagcgttttcatttcttctatatttttagtataagcgctttctttcttaatgtcaattaatgttatttaaaaatatataagccgcccattttgttgacctatccccatcattaacctgtcacctgttattttatcgcatgaaaggtattttttatgctccctactaaacacaaaaaaactgctaaccaatgcctaaaaatcgtcggttagcagcttttagctattttattgtttagtatagaatcgttttaattttgtctggcaacgcgattgtgcccgtttcatctgttcaaacgtgcaatctagctgacgacacgcttgctcaactgctagttgccccgtcaaaacccgaaaggccactaactctaaagcagatagtgtctctaagtacgcccgcatttcaaccgttgactgatagtatgcaacggtatcttcagcgagcgcattgcattccggacaacaatcaaataacagggcttgctgatcgacccgtcgtttctgagcaagttctttgcgaatcaagtttaatacgtggtggtgaaagcgtaatttataaaaaccaccaaaacttttgccgcaattttgatcataacactggcaagtctcataacagacgattcgcgcttcttgtaaccaatcgtcctcatcaaataagcgaatataatatggagtaaaggtgcgataaaccattggtaggtaggctttaaataaaacatccaacgcctcagaatcgttttcaaccaccgcttgaattaagtttgcatcacgttttgctgattccatcaacgaaccacctctcacgcaaccccacgtctttatcttaacaagttatcgtatatttatcaagagaacgtttgtttaatcatctttttcagcacttagtgcatctcgcatctgtgcaagttgatctagttgcgccggattccacggcatattccgttgcaaggtccgatcatgataatgcttggcatcatggtcaatttcacggcgcgttcggcgaatctcacgataaaaatcgtgcgaagacacccgcaatgcgccccgtgaaaaaatcgtccactgctcagcttgatcactcgaaacaaccgtcacttgcgtaatcggcgacattaatttacccgctaagccttcgatataactgtccgctgtttcatcctcatcggtgaagacaacttccaaatcatactgcgcataactttgtttaatccctggcacatacattgcatcaaatactaagatgacttcaatctcacgaaacttgcgatattctgataatatctgcaataaacgatcacgcgcatctgcgagatgatcattttgtttcaacttattcagctcgggccagttcccaatgatattataaccatctgcaattaagatctgttttttcatctgctataccaaaggttgacggctattataagcctgatacattaaaacccccgcagcaacactcgcatttaaactttgcacatgaccgaccattggaatcgtcaacgtttgatcaacttcttttttaacaattggtgaaagccccttaccttcattaccaatgattaagccgattggtcctttagcatcccacttacgatagtcggtaccagccatatcggtgccaaaaatccaaagaccacggtccttcaatttcttaatttcttgtgttaagttcgtgacacgcgccactaggatatgttcgatcgcaccagtcgatgtcttagcaactgttgatgttaaccccaccgcacgatgcttaggaataataatcccatgcacaccaaccgcatcagctgtccgcatgattgaacccaagttgtggggatcttccaagttatccaagattaagataaacggttcttcttctcgggctttggccttagcgaaaatatcatcaacacacgcatattcaaacggtgcgattgctaagataatcccttggtgattttgacggtcactcaataagtccaacttatttttaggcacattttgaatgattagacgtttttctttcgctaatttcacaacatcgtggacaaagtcagccttcaagccatcttgtaagaaaattttattgattttcttcgcatcactggtcttcaatgtttctaaagaagcgtgttttccgatgacgaaatcagtttgttcttcaacaactgcttcttcgacgggtgctgctggtttcttgttagctggacggcgcgttggctttgccgaattattggccgtccgacgactattgaattcgttgttcttttgtttgaatggttggttattattttttctcatgggtcctcccagcgtcgacttgttgaatacaccagtgggctaattcagcgacgcgctcttgttgttcagttaagtatagatagccaaaaactgcttcaaagcccgttgaggtccgataagtcgaaacactcgtattcttggctttcgtataacttttggcatttctaccgcgtttaaaaatattcatttcttcttctgttaaataattatcatcgatcatcaaaccaatcaaagcagcttgcgctttagccgacacataatgtgtcgccacttgttgcaagcgcgttggtttggttaaaccgagttctagcaaatgggcgcggacatacacttcgtaggctgaatcgcccatatatgccaacgcaatcccgtttagttgtaaagcatttttcatgcgcgtctccatctcattccttgtggtgtatcttccaaaataatcccttgttctttcaattgatcgcgaatcgcatcactgcgggcaaaatcctttgctgcccgtgcagctttgcgttcttcaatcaagctttcgacctctgcgtccaacagttgggccgccttaaactcaacaccaaaaatggctaacaagcgcgttagacgggcagttaaatccactaacgtaccagcttggacggtagcccgttccaggtattgattactaagcttagcgagttcatacaattctgttaacccgttttgcacgttaaaatcatcatccatcgctgtcacaaaggcgtcttccaagcttgccgcttgtgcggcaatgtctgcgtctgcgcccgcttcagcagtcgcttggcggaacgctaagttatcgagggtcgtttttaaacgatccaggttcgtttgcgcttcagctaataatgattcactgtagcgaattggtcggcgatattgcgtgctactcatcaagaaacgtaatgcttgtggattaacttcttgaatcaaatcatgcaccgtcacgaagttgccaagagacttactcattttttgatcatcatccccgactgtcacaaagccattgtgcaaccaatagttgacgaaatgtttaccagtcttcgcttcactttgagcaatttcattttcatgatgtgggaactctaaatcttggccaccgccatgaatatcaatcgtgtcgcctaaatatttggtcgacatgactgaacattcgatatgccagcctggtcgccccttaccccaaggtgaatcccaagcaatatcggtccctttttctgacttccaaagggcaaagtcgattggatcttccttacgtagggtttcttcggttgctgtatgttcgctggccccttgttcgagctgatcgatatcttgaccagctagatggccatagtccttaaatttacgagcacgatagtaaacatcgccatcaacggcataggcataatctttagcaattaagtcttgaatgaacgcgataatttctggaatgttttctgtcgcccgcggattgagtgtcgctgtttcaatattaagtgcttgggtgtcttctttaaaagcggtgatatagcgttcagctaattccggaaccgtgatttgttccgcattcgcagccttaatcatcttgtcgtcaacatcggtaaaatttgagacataatcgacttgatagccacggtattcgagatagcggcgaatcgtatcaaaggcaatcgcactgcgcgcattaccaatatgaatatagttatacacagttggtccacagacatacattttaacgcggtctgcttgaatcggtttgaagacttctttttgacgcgtgagggtattataaacggttaacatcgaatcttcctttcttaaacgtgctcttgcaagcttatttctgcgcttaaccaaatttgcccaattggcgattgcatcgccaattcgtcaaatccagttaatgctcaaaatataaccatctgctgtcgcactcttcttctaaacgtgctttttgaaactgacttctgtgctttgctccataccgcaaacgatcgccggtggcgctccctcacggtattaggcaaatgctcgaagtcaaaccgtttcaaacgcactcttccaaataaaaagcgtcctttgttggttaacaaaagacgccgattgagcgtggttccacttttctttgcaaaaatgccttgaacaggtaacggtgtcccggctaagtcacaaagtcacttggcatttcagaggtgcatttcgatggggcaatcggctttcttccagcaattcgaaagctctcttaacaattggcatcatctacttattctcttcatcaattttaacggtttagttggtctccatgatacagattattgacgaccgtgtaaagtgttctgcgtggctatttttctttcaagcctttttgttgatgcgctggtctagcaaaaatcatccgccccgcagcggtttgaagcgcacttgtcacaatcacttctagcggtttatttaagtaatgttggccatcttcaacaacgatcatcgtgccatcatcaagataggcaaccccttgttgccgttctgttccggctttcaccaccgtcacggtcatcgcttctccaggtaaaactgcaggcttcaacgtattggcgagttgattgatattgaagaccggtacgttttgaaattcacagaccttgttcaagttataatcattcgtcacgacaatcccatcaagtaattttgccaatttaacgagtttactatcgacttccgttaaatcctcgaaatcaccgtcgtacatttcaacagataagctatcgtctttttgaatatcgtttaagatatccagtccacggcgcccacgtgcccgcttcaaattatcagcggaatctgaaattaattgtagttcatgtaagacaaagtttggcaccatcaatgtgccttcgataaagcccgtcttagcaatttcttttattcggccgtcaataatcacacttgtatctagaatcttatacttacggaaattatcgccgactttacgttctaatacatcagcattgcgtttcttaggttggatcaaacggcgccattcttccattcgcgttgtcccaattcgaaagccgagataccctaaagcaatcatcaataaaatgggtacaactgtatttaatgcaaaaatgggcatccggtatagcggaatcgaaacaacgtttgctaataacaatccaattagtgaaaaaacactcccaaataaaataaaactaggtgattgtttcgttaaggctttttcaagccggtgcatagctctcaacattggtgttgccagcgccaagaataatagatagaaaataatggcccctaaaatgacgttagtaataccgttattgagatacatcatgtcttccaaatgaactaatggccaaaatactgggaacgccgtaattccaagcgcacctcctaagataatgaacacaattcctaatattctttttttagtaaatcgtttttgttgcatcgttcaacctcctctcgctccaacttatgcctagttgaatactttctttaaagtttctgcaatcgtggtcacaccaatcacttgaatatccgtcggtgcgtcccacccttgtaagttattctttggtacataaatacgtttaaagcctaatttagcagcttcaatgacgcgttgttcaatccggttgacccggcgaatttcaccagtcagaccgatttcaccgacgaaacaatcagttggtggaatttctttatcccgatagcttgatgcaatcgaaacagccatcgccaaatcaatcgcaggttcatctaatttaacaccgccagttgcttttaaatacgcatcttggttcgataacatgagactagcacgcttttcaagcaccgccataatcaaggagactcgattatgatctaaccctgaagacgtgcgctttgcattcccgaatagtgttggggtaattagggtctgtaactcgaccaagatgggtcgcgtgccttccatcgaaacaaccacggctgaacctgtcgcccctgccaaacgttcttctaggaaaatctcggatgggttcgcgacttcttttaagccggcttcacgcatttcgaaaatcccaatctcattggttgaaccaaaccggttcttaaccgagcgaagaatgcggtaagtatgatgcgtatccccttcaaagtacaacacagtatctaccatgtgctccaaaatcttaggaccggcaatagcgccctctttagtgacatgcccaaccacaaaaatcgtaatctggttcgtcttcgcaatgcgcatcaattcagcggtgacttgacgcacttgtgaaacactaccgactgcggaagtcacttctggttcgctcatcgtttgaattgaatcaatcaccacaaagtcgggtttcattgtttcaatctgatgccgaatattgcccatatccgtttcaggatataagtaaagttgatcgccattcacatcaagccggttagcccgcatcttaatctgggatgcactttcttcaccagaaacataaagaatcttaccaaccttttcaagttgtccggaaacttgtaggagtaacgttgatttcccaatcccaggatccccaccaattagaatcaatgagcccggtaccactccaccgccaagcacgcggttgagttcgtttaattcagttttaatacgcggttccttttgaatattaacggtgctgatttgttctggttcagttgcccgccctgaaatcgtaaaacttgatttcgcgctagctgcaggttgttcacgttcttcgaccatttggttccaagcgccacaattcgggcaccgacctaagaatctcggggaactatagccacaattttggcaaacaaactgagtcttaattttagccacaaagattctccttcattatcgagattagttttattttaacataagtttgtgaattttcggcgacctagcgattaacgtttagcgaccagatgagccaaacccacccgttcgtttggtggttaccgtcgcttcatcatctgcgactaaatatggcatgaagatgccttgtccaattcgttcaccttttttcaagataacatcccgcggactgaagttaaccatttggataaaaatttcaccttcgttggcatcattgccgtagtaatccgcatcgataatgccgacgccgttgggtaaaattaacccttttttgagtgggttgcttgaacgattggcgatcattaaatattcgtcgtcttgcatgtaagccttaatcccggtcggtactagaaagggtttcaacgtttttgatgcacgttcaaaatcgtcatccactaacggtttgccatttcgaatcattcggaacaaacgcacaaagttgtaatgccagattgatggcaacacgaagtcctccgcacaagcaaagtcgtagcccgccgaatgcgctgttgaacgcaccggtaaactcaatcccgcctcttggtatttggtcacaatttcaaagccgcgttttttcattcctaaaactcctaatattatcgcccatttgggttctttttgtaccactgtatcataccatgaaaccgcggaggctgtgaataatgcctaagactgatttaattaaaaatttaacaaaaagcgcccaattaaagcgtttttttcgtataatagatttattaatacaaaaggggtgtcttgatggataagaatgcaatgaaaaagatggcagctgaacgctcagtggattttgtcgaagataacatgattttaggacttggaacaggttcaacagtagtttacatggtggaagccctcgcaaaacgggtacaagcagaacacctcaacttaacatgtgtctgcacctcaattcgtactgaagaacaagccaaatcacttgggattccggtcaaagcactcaaccatgtcgaccacattgatttaaccatcgatggtgccgatgaagtcgatgccaacttccaagggattaaaggcggcggtgctgcgcacttattcgaaaaattagtcgcaactacttcaacccgcaacatttggattgttgatcaagaaaaagtggtcgatacaatcggtcgcttcccactaccagttgaagtgattccatttggcagccaacaagtgttcaacaaaatggctaaagaaggcttaaatccagaattccggatgactgcagacggccaacacgtcttaactgattctaaaaactacgtcatcgatttacacctcaaccaagtccaacatccccacctactggcatcatggctcagtgaacaagtcggcgttgttgaacatggtctattcctagacatcgtcgaccaagtcgtggttggcgcacctgatggcgtgaagattttaacagcaaaataaagcgtgcgtttaaaggagatttgacactgtgcactagcacagtgttttaaatgaccgacaaaatcggtcgtttgcaatacgtagctaagcgcaagcgtcagctttaaaaagcacgtttccaaacgaaccctcagcggttcgtttttttgtgtcccgtgctctcatataaatcgttttctttcacatttatcaatcaccattcttttagctttatccccgttattcggtttacatctcccatctaatcaactagaattaaactaattcaaaaattaaggagtgattagatgacccaagaaattacacataataatttaatcaagatgcggaccgctttagctggcgtgccacaagcaacgacgctcaaaaatgctgtgatgacgaatggcattaacgccgttagtcaacgccccgatgctgccgtcacccttgatccaacctactcaatcgacctccccactggtgatgtcagctttcaaaaaaagagtgggcggtgctggttatttgccactctaaatacattacgccacgatttcgaacagaaatatcacgttaagaatttcgaactctcccaaaattatctatctttctgggatcgcatcgaaaaggcgaacctcttttatgaaaagattttagcaactgccgacaagccgattacggatcgcgaagtcgccttcaccctcgctggtcccgattttgacggtggccaatgggacaacgcagtggcactgattcaaaaatacggtgctgtgcccaagtcggtcatgcccgaaacttataacagtgacttaaccactgaattcaacagcactcttaatttgaaactgcgcaaagatgcgattcaattacggcaacttgttgctgacaacgctagcgaaacaaccatcagtgaaacgcggactggtttcttaagtgaaatctatcggctatgtgtttacgcattcggcgaaccagtcgaaacgtttgacttcacctatcgcgatgacgaccaaaattaccatgaagaccgcggtttaaccccgcaaagtttctatcaaaaatatctcaatcgcaactttgacgactacatcaccgttgtcagcagcccccaaacaagtaaacaatacaaccaactctacagtttagaatcgcaaaacacggtagtcgaaggtcacccaatgcgcctcttaaacttaccccctgaacgtttaaaagcactggctatccaatccttacaaaacggtgaaacaatttggtttggcaatgacgtgctcgcggatatggaccgacaaaaaggctggcttgatcgcaacctttacgactattctggactctttggtttcgatttgacgatgccaaaagaccaacgacttgactaccgacaaggcgttgtttcccacgcgatgaccctcaccggtgtcgacctcgtaaacgaccaaccaacgaaatggaaagtcgaaaacacatggagtgccaaagtcggtacaaaaggttacttcagtatgagcgacgcttggtttgacgactacgtttacgaggtaattgtcaaaaaagcgtaccttacaaaagaagaacaagccgcactcacaaaaaccccaattaagctagacccatgggacgcactgcaatagagtgcgtagtaagccgagtttatcctgaggattaacacagaacggcgaaggattgcgccagcaatcgtttgacgttcagggttaaccggaaggatatggcttacggagcacgtttcaaatcagagtgcgccatcaatgggttacttctgagcacttacagcacttgacgaattggcaatgcagtcgccgatttggcaagtgaggtaaggcggaagaagttgttgatgaaagcacgtttcaaaaaaataatgccattcaaaccgggtaatttaatttaacccaccaaattttagaggaggttttccacatggttcaacccattacagcaaaagatattcaacaattcaaagccgatttcaaggcaacaccacaatccaacacaattaaaaatgccattatgaacaacggctttttagccacgagtgctaataccgattcaaaagccaaaatggcccccgttttttcaatcgacttagataccggtgccgtttccaatcaaaagcaatctggtcgttgctggatgttcgccgcgttaaatacaatgcgccacagcctccaagaccaattcaaaattaaggatttcgaattgtcccaaaactacaccaacttctgggacaaattcgaaaaatcaaactacttctacgaaaacgtcttgaagactgccagccaaccaattggcgaccgcaaagtcgacttcttaatgacaacgccccaacaagatggcggccaatgggacatgctctgcgcactcatcgaaaaatacgggattgtacctaagtcagtcatgcccgaaacatataatagtgaaaaatcaggcgaactcaacggcgttttgaaccttaaactccgtaaagatgccgttacattacgccaattagtagccgacggtgttagcgaagccgacatccaagctaaaaaagacgcgatgttaaccgaagtttaccggatgctcgtttatgcattgggcgaaccacccgttgaattcgactttgaataccgcgatgatgatcacaactatcacatcgaaaaaggcctcacaccgcaaacgttctatcaaaaatacgttggctgggacctcgaaaattacgtttcattgattaactcaccaactgccgacaaaccatacaaccacttatacagcgttgaaatgttgggcaatgtggtcggtggccgtgaagtgcggcatttaaacctcgacatcgacaccttcaaacaactcgcgattaaacaactacaagcaggtgaatccgtttggttcggtagcgatgtaggccaatcatctgatcgcaaactcggcatcatggacactgaaatttatcaaaaagatgccatgctcggcatggatctttcaatttctaaaggcgaacgccttgattacggtgaaagtctcatgacccatgcgatggtcatcaccggtgtcgacctcgtcgatggtcaaccaaccaaatggaaggttgaaaactcatggggtgacaaagttgggacgaaaggttacttcgtcatgagtgatagttggtttgacgaatttgtttatcaaatcgtgatcaacaaacgcttcttaacggatgaaatgaaacgcattgaaacagaagaatacgatcacccaaccgttctcgcaccatgggatccaatgggcgcattagcaagtcgctaaacagtaaaaggggctgagacaaaagtaaattttgtctcagccccttttttgatattagaactttaatcgtctaaacgtgttcttataagtcatccccttccggctaatcctcagggtatcccgacttatggcacacgcttttttatgttccagtacagactgcgagcaagctatcataataaatctgcatcatcatttgccagtcactgaattgaagccattcatcccctttatgggcaatccctttttgacctggaaatgatgggccaaacgcgatgatgttcggtaacgcgcgcgcataagtcacgcccgttgttgtgaccggtgtgccatccaaaccagtatctgccgcataaatcgcagagggttgttgaataaatggcaatgttggatcagtaacttgcgatggataacgccgtttaaccgtcaacgtcatccccggcaacatggcagctttaatcccagttaacaactgatcttccgtcactgggattgggtaacgacatgtcagatgcatacttaactgttgggcttcaatcgataccccataaaaagcaagttgcaatgctcctgatgcttcatcttgataattaatccccaagttttccccagttgactgcgtcccgattttagcggctacccattgataaaattgacccgtttgaccagtgagttgacttgcatcggcaactaacttcggtaacacattatccgccatttcggggcattgctaggtgcctttttgccgtgataagttttaaccgtgccatcggccaaaatcagctgtgcatgatctggcagataacttttagcgaaccgtccttcaatcgccgtaatttgttgctcagagccgtccgtaatcggtaacgctaactggacatctaacaagccccgttcgccgtagacggctggaaatttacaatctggtgtgaattcggcatatggtgcggaatgttccgccaaataaattggcatatcctgactcccagattcctcatcagtgccaaaaataattcggacgcgttgtttaaatgttatcttttgcgtcttaatcagatacagggcaaataatgtcgataaaaatggtcccttattatccaaaacaccacgcccatacagcatattatctacctgagtcagttcaaatggtggataatgccaatcatcttcaacatccacgacatctaaatgaccaagaatcccaaaataagttggcgcttgcgtttcgtctggtccatattctgcccagccaacacaattgccgacttgccccgtcctaaagcccattcgatcagcaatcgccaacactgtttccaatgcgcgtttcggaccaattccaaacggcgcttcaaacgtttgcgctccacacacactcggcacgcgtaacacttcccgcaagtccgctaagaactcatcagcatgtgcttcaaataatgccttaaaatctgctctaatcggtttcacaagaatggcttctttctattaaatttcgtcaaaattaatatcaacatcgtctaagccagccgcttcggcttcttccgccaaatactgccgatcaatcatcatgataaatggatagtaaattaaaattccaagcactaattcaaataattggaggactcaccctgtccaactcccagttgaaagccacccagaaataatcggtggtgttgtccatggcaacataacgccatttgtatacggtacccatccgagttggaatacaatccctgaaatcaatgtatttaaaaccggtacgataatgaatggaattgcaataattgggtttaaaacgactggcaaaccgaagataatcggttcgttaatcccgaaaataccggggacaattgccaacttacccaattctttgacgcgttttgacttgcagacggttaacatgaggattaagagtgagagggtactcccaccgccaccgtatgtggtgaagatgtcaataaattgttgggtgaaaatatgtggtaactgcgtatgattctggaatgctgttaagttatcttgcgtcagaacgaagaaaattggtgaccacacactgttggtgatagttggaccattaatcccaaaacaccagagcaacattgcgatgaagttataaagcaatacagatggcaatgagttgccggcaccttttaacggttgttgcagtaacgtgtagatgaaattgtaggccgtttcgaaactcgaaaggctaaaaccaattctaattaagaagaaaactaataccactaagccagccggtagtaaggcatcgaatgattcactaactgcaggtggcacaccatctggcatcttaattcgccagttgcgtttaatcgcaaaacggtaaatttcaacactgactaatgcgataaaaatccctaggaaaatcccgttaggtcccaaatacattgtttgaatggcaccgattgattttttaccaacggtgacaacagtcggtgtcaaaattaagaatgaaataatagcaattgcactggtatgaatcgcttgtaaccctcggtttttaccataggcataggatatcccaaaacaagcaagcaaccctgtaaaactaaacactaaattagaaacagcactaaaccattctgtccagtgcggccctaaaatcccactccaaaattcagtccaaccaggaattggaaaattcccaatcagtaagaaaatcgatgtcacgataatcaatggcgtaatgattaagaaaccatctcgcaatgatcggagtacaacattattccccagtttaatcgcaaccggcatcaaaatctgttcgagtttcttttgcatcggttttgcctccttttaataacaatattggttaataaaatcagtaaaatcagcgccttcaaccttcattttgcataactgcaatgcgtggtcgattgaatccgaaagaccagtaccacccttttttggtatcttcacaatcgttatttgatcttgatactgttgaattaaatcggcattcttttcgatcgcggtcagcccaacaaccggaattgttgtttctttttgaatagtggctgctaattcacacgccatcgtcgaaaagtcccgataatcataggtcggtcccgcaatcacaacgtctgcacccattttctcactcatcttcgcaactttccgattcacttcggctttgtttgcctgataataatcagttccgcaataaaaggtcccgataatttcagagtccattttttttaatgccttatcgagcgtatccgcagcacccatcgctaatttttttccacctaaaggggtatcccctttttccttaccacctaatccagcttggatttgatccaacaagacaattactttcatttaaaaccctccttttaatgttcacgttgcaagatgttatggaacgtgtatttatcagcacgataatgcgagttatcataaagaattggataaccgtccattgaatacgcaaccgtgtgggctagaaaagcgggttgccctggagaggtctcaagtaagtcacttaagcctttttccaatacgactgcttcgagttcttgattggcatacccgattgggattgtttgctcaatcaagcggtagagtgacccttgtgcctcatgggccgttaattctggtagaattttttgtttcagatagatttgttcgtgggtcatcgcttcaccgtctgccattcgcaagcgttcaatctgccaaactggctcctgtggtgctaaatctaacttggaggccacatagtccggataaacgattgtccggcgtaaatctaacacccgcgtgctgacatccaattgaaactgtttggctgcttcggtaaaaccaactaaaccagatgaaccactcgaaattttactttgtgttgcaagtacataggtgccacgatttcgatcgcgtaccacgacatgttgtttaaccaatagatcgattgctttgcgaattgttagccgcgtcgttgaaaattgattggctaaatccgtttccgatggtaatttctgatggatcccatagacccctttttgaatgtcatctcgtaaggcttctgcaatttcaacgtatagatacttaaccattccaaccacttcctctattcaactggtgctttaatccgtttcgcgtaggcttcaagccattctgctgaaatgggttcgatcaccgtcgtttgacttggccctggattagccataaaaatttgtggtgccgcatcttgattgccagctgcaaacgtaaactcaacgttcgtcgccacgccccattcaccttgattatttaaggcaaccaacgaaaactcgccagctttgccgtagcgtttttttaatttctcaacaaacggatagactgcttgatcacacgctgcttgtggtgataaaccggtccccatcaggcgcacaatctcatatgaaagacagcccttcattaaatcttcgcctaacccagtagcggttgcgccaccgatttcgctatccacgtaaaagccactgccagataatgcagaatcaccagtccgccctggttttttcataaataatccagaagttgacgtccccgctgccataccggcagcttgatccaaactaaccatgccaactgtatcgtgaccatcatatgggctaagatttttttcgttaatttctttaattcgttgcatccagattttgtgtgcgcgttcggtcaacatattacggctttcaaaaccgttgaacatcgcatattgtgacgctcccgcaccaaccaagaaactattaaaatgattgtcacttaattgacgcgcaactgagattgggttcttcacatcactaattcctgcaacagcaccaattgcaaaagtgttgccatccatgaatgccgcatccatctccactaagccttgcgcatttggcaaaccaccataactgaccgatttaaagaaggggtaatcttccacttttttgatagcggtttcaattgcatccgtactttgcccaccattttttaaatcagccatcgctttttgaatcccttcaaaggccattcgccaagtcccaatcattgcatatgtcataactctcatctccgcatgtaagcgttttaataatcacggtataatcaaaattgtatatacaatcaatactttttttgaaataaaaaagccaccgcagtgacttttcatttaaagatagaggccaatcaacattcccactagccaaaaaccgttaaagacaattagattctgaaccgctgtaccaaatacaacgcgtttttcctgactcttctgtaatgcaaacccattacgtaacaaagttgggccactcgcaaaagctagcgctgctggccatggatataatttcaggccaatcccaacaataatcaccacgtaacaactatacgcactaagttgataaagttgaatgccgcgcttttgaccaatgtaactgattaatgtgtgccgcccattctctaaatcgactgtgtaatcacaaatattgttcattaacatcaaattagcaatcaggaagacagttggtaaactcgccacaaacaccaaaatcacattcagccaattcagttggaataacattaacggcccatcaaagcgcaaatcgaccaactgatccgccggaacgttgacatacaccgtcaaaaagaaattaccgaaccctaataccagactcgataacaactcacccagtggtaatcgtgaaattgggaatgggccgtaagtatataaaatcccgattaagatgaacagaacactgatggctaacacaattaaatttgtgcgccagaccagaatcagccccagaacggttgccgtacttataaagccgatcaaccagcgtaaagcaaccttaggggcaatatcttgtcgtcctaatgcactggttgattgctggagcgtttcatttttagcgaggtgaaagtcgttgtaattattccatcccgttgtgaagacatcaattaacaccaatgcacagaagtacaacacggtattgatcggatcaatttggtggaaataatacaacgtaaaaaagaacccagccataaagggaatcacgctaccaactttagtgcgtaattcgataaaatctaaaaacgccttaacagacatctattccgcctccgataacattcaatagtcctattctaacagagaatgtctaacaaataaaaaaagagtcggttggaacaaaagtaacttttgccctaaccgactctttcaacagccgaaatttgatcatctaaccatgttctatctgaacagatcgcatacgctgtttgattctattttgttttcaaatcttcaatcgaattaatattcgtcatatacttcggtacagctaaaccgaccttagcaccctctaagttcggacctaagtcttcaatctgacctttgtaatccttgtagtataaaccagaggtcttcggtaaccatgcggaaacttgtgcatcggctgctttagttgcgactgacgcccacatcggttgaatttccatagcttgaatcgttggttgataaccttgttgacgtaaaacttcagccaccacgttagttgacgcgatttctgaatcccaagccacataggttaacttaattttcgtgccatgaacctttttaacacccttagtccactcagcaactttttctggattgtcttgaatccaatcgcgcgccgccttttcaggttcaacaccgtcattgactttaagcattacggtcgacatttcctttggcgtccaatggaatcgatctaagatggtatatgcttctggcatatccttctttagccccttacgaacaaccgtattaatgtgttcagcttgaccaaaaacatttttggggtcttttaaaaacttgattggatatttagtaaacatccaatgtggttgccaaccagtaatgacgattgggcgtttatccgcaatcgctttgtctaacgtactggtcattgccgcagttgagctggtttgcaactgccagttctgatcattcaaatgatacttgttaattgcagtttgtgtggatgccataatcccagcacccgcgtcaattccggtaatcgtgtaattaatttgaccgcctaatttctcatcggtagcgtacggcttagtttgcgaactgcaggccgttagaagtgtgacgagccccactaaggtgaaaaaagctattaatttattcttcttaatcactgaatccctccttaatgtttacgttgccggttcaaagcttgggttaaacgatcaataataatcgctaagattacgattgccaagccggctgcaaaaccgcccccagcatcattccggccaacagcaaagtaaactcgtgttcctaagcccattgctccaatcattgacgcaatcacgaccattgataaggccaacatcatactttggttaaccccagccattaaggtcgatttcgccaatggtaattgaaccttaattaacttttgccattcagttgagccatatgaatcagaggcttcgatcaattcggttggcacttggcgaatcccaaggtttgtcatacgaaccgttggtggcatggcaaaaatcactgatgcgaaaacgcccgggaccatcccgataccaaagaaggcaacggctggaattaagtaaacaaatgccggcattgtctgcatgaaatctaagatgggtttaaatattgcctgggcaatatcgcttttggccatccaaattccaagtggcaccccaattacgagggaaatcagactcgaggttaacactaacgttaacgtttgcgtcatatcccgccagaaatcaaggttccaaatcaagagtaggccgaggacttcaaagataattaaaccccattttttggtgtcgcgattcgctaaataagtgacgccagcgataatcacgatgaataaccagatggggattaaatcaaacacccattggaaagcgttgataattccgccaataaaattcgttaaaccattaaaaaagccagtaaattgtgtcagccaatcgacaaagtgatccatccaattggcaattggtaatttagcaatcgtcattaaattaagcaaaatggttcacctcgtttcctgcaagtgcccctaagacggccccgcgaataataatcccacgtaattgttgcttatcatttaagacagcaaacggaatgcccgtttgcgaaatatcatctaagatatcagcaattggtgtctcttcatcggttgttggaacttcagtattcacgattgattgcaaatcacgactttctttgcggactaactcaagtacatcacgcgcatcaataatcccaactaactcacgtttactgttgacaacgtaagcattagaaacttcattttcacgcattcgttttaaggccaaacgagggccatctttttcaatattaacagtcgttgggcgaatcataacgttgccggccgtgtaaactttactacgatcaacgttttcgatgaatttctctacatactcgtcagcaggccgtgtcaagatatcttccggtgtcccggtttgaacgatttccccatccttcatgatcatgatgtggtcgccgattttgagcgcttcatttaaatcatgactaataaagataattgttttgtgcatcgtttcttgcaagtcgagtagttggtcttgcatgtcagaacgattcaatggatcaagcgcagaaaaagcttcgtccattaataaaatctcagcatcattcgctaatgcacgcgctaaaccaacccgttgttgcatcccaccagataattgtgtcggatactgatcgccataaccatttaaaccaactaaatcgagtgcttcattcgctttttgttcccgtgtcgccttatcaatgccttgaatttcaagcccatagtctgtattttcaagaatcgttcgatttggaaagagcccaaaattttggaataccatgctcatctttttacgccggacttcacgtaatgccttcttatcaatctgcattaaatcctcgccatcgattaatacactaccttcagtaggctcaatcaaccggttgatcatccgaaccaatgttgatttaccactcccagatagtcccataatgacaaaaatctcgccagattctacttcgaagttagcccggtcgacaccgattgtcgcacctgtttcctttagaatcgctgcttttgattttccttgtttcagtaattctttggcacgcggcacgcgcttaccaaatatttttgttagatttttgacttgtaatttgacagtcatagaatccccctttgatttcattttctgaaaactatatctaaaaagtatacaggtttattgtgaaagttgcacaccgtccacttttattctcattttattctaatgtgatagttaggtaaccaactttctttaaaaattaaaaaatcgctagatggggctttatgttagtctttaaaaatcagattagttctaaaacggaaccaatctgaaaatgcaactattttcctttgtacattaaaattaaatgagaattaatcccttttaaaattcacaagcccttaattaggccatcaaaaaaagcgttgaccaaatcggtcaacgcttttaaaaaatttagccatgtactgcttttcgttgatagcgatgatacaaagcaagggccataatcgtaaagacaatcggaccaatgaccatccagaaggcatctaaatattgaccttctaacatcggttgaataatcgtaaaggcaattccgaagacaaggactaagtcgaccacaatcgtcaccgccttaacagcaactggtgatttaaagaattcgtaaggccgttccaaatctttgcgtgccttgaaatatggaaaggcagtcactaaaaagaggtatggcaacgatgttgaaacgttagacatcaaagtcaagacattatagaagtcaccggcagctttaccaccaaatgaaataaccgcgattaaaatgcagactaataatgcttgcgcccacattgctttttcaggcatgccatgcttgttaacttctgcaaagccgttcggccagagtgctttaggtgtcccgagtacaaatgactttaatggtgaataaatcaagacggcaaatgcgcctaagtaactgataaacatgattaaaccggtaatccgagcaaaggttgttccaatcgtcatcgcaacgggtgtcgtcatcccaaaggcatggccgaattgataacccaagttttgcataagaacataagtaatattgcccatgttagctttattcccgctcaagacttgttgccagttcgttgagatgccccacataaagattgcaaccgcgtagattaatgtaatgaagactgtcgcaatcattaaccctttagggaaagtcttttcaggctgatccatactatcggtaacaccgcccatggcttccatccccgcgtaagcaaagattgagaagacaacaaatgataacatcccaattggtgtttgatagctactcatcggactcttaacaaaggtcgtcgtcccatgaatcggttctgccaaatgaaaacccgttttaaaccaaatcgccacactaatcactaagaatgcggcgaataaaaaggcaacggccatcccactgaatgacgcaaacttttgaatcttatcaaccccacgacttgataggaaagttaataataaaatccaaagaattcctaagacaccgaccacttgagtgccattcatccctaataaatgccaggttgctgtttgatctgaaccttggaggaacgttgaaaacggcacccacactttagcagctgttgacaccatccagacaatccatgacgctaaccagatgaacgtcccgatgaaagccgcctttttaccaatggatgcttctaaccaagaatagatgcccccgcgtgattctttcaaagaagaaccaaattcagcaaacattaatgaagttggtaagaaaaagaaaattgccgctaagatataccaaataatgctggcatagcccattaagtagaaagcaattgtggtattcgcaaagccgaagattgacccaaaaatcatcaatacgagaccttgaacgttaattttttttgatttcgccatttcaataagtcctttataattgtattaagtagaataaatatacaattcaaagggcataatgtcaattatatttgaataaatcaaccgtttccagcctttttattcatgtattcataattatatacaatttacgccacaaaaaaagacgttcacttttagcgaacgtcgattgccttatttaatgttggcaaccttagcgactttgccactattgacactcgcgctaatttccccttcttgaccgttattgataacaaattgatcggttgcttgacaccgtgggcaagttgtttcaatttgaaacttggtagagccatctgaattatcttctagtgctgtcttcgtcgtgatttccatcgctggatgttggcacttatagcattgaaagacaataaaacgccgttctacaaattcatctgctaaactcatgtgattcatcctttcaactagcttatttaagttcattctagcagtctgctattttttagggtacctttttgctcacgtgtcgttttctgaaagcatcccttagaaatgaatcaaaaggcgaacgattttaaagtttaaaagcattatggtatgtgatatacttacaacacaccatctagaaggagaggtttaaaagtttgccaatcacactaaaagcaagttatttttctgcaaattcaccaaattatagttcatttcacgaatattcactgatagaaatcagtgataatggtcaaatcacaaacattattcatcaaacggcgtcagaatactctgagcgattatcagctgcacgccaacatgaccacttaatcacactcgctcccggacacttcttgttaccaggctttatcgatctacacaatcatgcgccacaatggccacaagctggaattgcccttgatcgccctttagctgattggctcaatcattatacctttcctcttgaagcgcgctacgccgatttagatttcgccacacctgtgtatcaagacttagtgaccgaaatgctcgctaacggcacaacaaccgccctatatttcggaacaattcacaattctgcgaatctacgactcgcagaaatttgttcccaagcagggcaacgggctttcatcggaagtgttgcgatggataatccagatcaaacaccagactattatcgtgatgcttctcctgaagaagccattaataaaacacaaacttttgttcaagcaattcaagatacctatcgtaatgggttcattcaacccgtcattaccccccgcttcatccctagttgcacaactgaaacacttcagcaactcggtcaacttgcacagtcccaacacatcaccgttcagacacactgcagcgaaagcgactgggaacacgattatgtgcgcgaacgttacggccatacagactctgagatgttgcaatcattcggattattgaatcaacattcggtattagcacatgcaacacaactgacaactactgaccaaagtatcattaaaaccgaacaagcagcgattgcgcactgccctatctcaaatgcctattttggtaacgggattctccccgcacacgagttacttaatcaaggcattaaaattgggcttggcagtgatatcgccggtggttatacccctagcttatatgccaatttgcaacaagccgtaacggcctcccaaattcgacaagacggggttgacgccaccattgcggctgaccaacgcggtgttgcgaacagtcggatcagtgctaaacaagctttttatatggcaaccgtcggtggtgcaactagtcttggcattcaagctggtgccattgaatcgggattgcttgctgatttccaaatcgttcaagcgccaccacgctttgcaagtcttacaccagatgaacaactcgaacaacttttattccgccacaccaaacaccaaattaaggccgtctacgttcaaggtaaactggtccacgaaaaggagcacaactggtatgaatgaacaatctcaaaaattaatggtcggtcctgacgagccgatttcgaatcaagaagctggcttcttaggactacaacacgttttagcaatggatgtctacgttccccccgttatcattgccggtttattggcgatgggtcttgatgcaaaagccggcttaattcaagcgacattccttgctgccgggattggtacgattcttcaaaccaaattttttatgaaaatgcctgtttcccaaggcccttcatttgttccaattggggcaatcgccgggatttactttgctagtggtgctaaagacggcgggatggcaacggtgattggcgcttcaattgtcggttcaattctgttaattcttctcggcgtcaccggcctcttccaaaaaattattaacagcttagtcccccaagtcgtcggtggcacaatcatcaccatcgttggtctttcactgatgccatctgctttaggtgataacattttcaaagcacagggcaatatcaatgagaacttactcctggctgttgtgaccgtcgccattctaattctttgtgtttcgctaggtatctacttccctaaattacaaaaactcttcaaagttagttccatcatcatcgccttattaggcggaactgttttagcaaccatgcttggtaaatttgactggcaaagtgtgaacgaagcgagttggtttagcttgccaagtttcaccgcattccactatggtatgcacttttcgatgacagcaatcatgaccttcgtcattatctacgccgttttaatgaccgaaacgaccgggacttggtttgcaatgagtgccgttacggattcgcccatcagtaagaaacaatggaatcacgggattatcggtgaaggaattagctgtttaatcgctgcactcttaggcggctcaccagttacagggtatgcaactaacgccggcattatttcaatcaccggtgttgctagtaaaaaagtattcgtttctgccgggatttggtttatcatcttcggcttctttaataaattagcggccttcttatcagcgattccagccccagttattggtgggattttcgccatcatttgttcaactatcatgctcaacgggttaaatgttattcgcacactacacacccaagaacgtgatatgtacatcatcggaattccaatcattctatgtatcgccatcatcatcatgccacaatcattggtgaaagcaacgcctcaaatgatccaatacttacttgaatcaccaatttcgatttgtgcgcttgccgcaattattctcaacttaatcttaccaagagacagacaaattgcgtttaattagactgaaataaaaagaagccccctgataaaaaagtttatcagggggcttcttttttcgtaaatgtatttcccgattgagacagcacactttttttaaacgtgctccagcaggcatattcctgtgcttaaccaaacttgtcgcatcggcgattgcagacaaatccagttaatactcgaaatataaacgcctgcttgcgcactcttttagacactgaccattcgaatcgtcatgatgttcttattcatcgagatatcttccacaatttctgcatattgcatttcccggggaatttcgatgcgatagacgttagtgtaaatcgtatcacgttcgttttgcgttactgagaagttcacatcgcgaatttgaatctgatgttgttcaaaatagctctgaataaactccttggtttccaatttatgcttatacttaatttcgatttttttcaacgtattgatgtgaataatctttttcaagaagacaatcacgaaaatgacaaagaccgcactgatcaccgcaatttgatagtagcccatcccaattgcaagtcctaatcccgcagtagcccaaagtgaggccgccgtcgtcaatccttgaatcttgtggcgggtgacaataatcgttccagctcctaaaaaaccaatcccactgacaacttgtgcaatcagccgcgcttgatcagaacgaatagtggtactaatcgcactatgcgctaatgcaaattgaacgttttgcgctgcgatttcctgctgaatcatcgcaatcacacacgcaccaatgcagaccagaatgtgtgtccgcattccggctggacggttcttatattcccgatcagatccgataatcccagcaattaaggttgccagtagcagtcgaataatgatatgcacactcgttacttcaaacaataaaatccctccaaaataataccttatctctagtctagcataccgaacaaaaaaagcgctcgtcaatccatatcaatttacggattaacgagcacctattcattagccaactaggccgattgtttgtagaatcaaatagatatttaaaagcgtcaacacaattgtgacaaaccatgccgtatatttcacccaagggcggttaacgaatgggcccatgattttttcatcactcgtaaacattgtcaatggaatcatcgagactggcaatgcaacactcaagaagacttgtgagtaaatcaagaggttttcaacttgtgcttcgttcccatggtagtaaaccgtgaaaataataacaggtaagattgataacccacgggtaatcacccgtcgtgcccacaatggaatcttcatgcgaacgaaaccttccatgacgatttgtcctgaaagtgtccctgtgatggttgaattttgaccagaagctaataaagcaacggcaaagagtaaactcaacattgggctagcaatgctcccaacaatttctttgttttgtaaagcattgaataagtcaacgaatcgtcctaaatcactgttagttccaaagaacattgctgcccctaaaactaagagtaaacagttaacgataaatgcgactgataattgaatgtttgaatcaatgactgtaaacttgattgctttcttcttttcggcgtaatcgtcacggtcatattgacgtgcttgtgcgattgacgaatgcaagtagagattatgcggcataacagttgccccgacaatccctaatgccaagaatagcatcttctggttggtaacaatccgtgtacttggtacaaatccgcgcattacgtcgcccatatttggttgcgctagaatcacttcgtataagaaaacgaataaaataacggccaccaaggttgcgacaatcgcttcgatcttccggaaaccaagtttcattaatagtaataatagcaagacgtcaaatgcggtaattaagacaccccagagcaatgggatgttgaaaatcagttctaacgcaattgcggaaccaataatttcggcgatgtcggtcgccataattgctaattcggtgacaatccagaggaaaatccccatctttttaccggttttggcccgcgtcatctgcgctaaatccattccggtcacaattcctaaacgcgctgccattgcttgtaataacatcgcaattaagtttgatactaggatcacactgatcaaggtgtatgcgtattgcgcaccaccggcgattgacgtgatccagttccctggatccatataaccaacggccactaacgcaccaggtcccataaaggccatcaacgtccgccaaaaaccagcgttcttgggaatcgcaaccgtgttattaatttcttcaagactcgtgccatcagcatagtgtatgaatttctcatgcttttgttgattaagttcacccttttgtgaatcttctcgctgcttcttatccatataagtacctctttctcttcgattgagtcgttcaactattaggattcaatgactttgattttaggatgacctaactctgatcgtctccagtgttcaaattaatccttacccattctatcatatctctttgatgttgtccctgaacaagattaaaaaaaagctgtttctcagcgtttttttaagtaaccgattacaaataattgcccaccttaagtgctattaaaaatgacgttgactgtctttaacagccaacgtcatttaacttttatttagacgactaaacttaatagtaaaacgccaattaacccaacaatcgaaatcaatgtttccaaaactgtccaagttgcaagggtttctttgacacttaaatcaaagtattccttgaacatccagaacccggcatcattcacgtgggaagccgctaaactgccggctccaattgaaaggaccatcagtgcagggttcacaccggctgattgcattagtggtaagaccaagcctgccgccgtcaatgacgcaacagttgctgaacccaatgccacccgtaagacaactgcgattaaccaacctaataatagtggtgataaattggcatttgcgaataatttagtgacactatcgccaaccccaccgtcgatgaggatttgtttaaacgcaccacccccaccaatgactaggagtgacatcgcgattgatttaacggcttcttcaatcgtcttcataatcgctagggttttaatccgacgcgcccaacccatcgtatacatcgcaaccatcaatgaaatggtcattgcaatggctggtgtcccgataaaaccgacgattgaatccagcatcgttggatttttaggtaatttcccgccgttaaaggccatttgataaatcgtggtgacagccatcaaaatgactgggaataatgaggttatgacactaattccaaaccccggtgtttcgtctaatttaaaggttttctgaggcccaagtgccgtcagattaccttggcgcgcgaacgcatctggtactaagcgttttgcaatcctagtgaataatggaccggcaataatcactgaagggatcgcaattaagaccccatataacaatacgtgaccagcatttgcccctaaagctgaggtaattgctgttggtgctggatggggtggcaagaacccatgtgtgacagaaagtgctgcagccatcggaattccaaggtacaaaattgacacacttacttcgattgcaatcgcgaaaacgattggtactaacaagaccatcccaacttcaaagaataaggcaatcccaatgatgaacgaagccaacataattgcaatttgaagtcttttttaccgaacatatcgattaaggtatgcgcgattctaaacgcgccaccagcgtcggcaactaaccgccccatcatggcaccaaagccaaagacaattgagagctcaccaagttgaccgccaatcccgttttgaacactggttgcaatgtccgttaatggcatacctaggccaaccccaacggccattgccgttataactaaagcgataaacgtattgatcttaaatcgaataataagggcgagtaataagataatgcccaataataggactactaatgccataattttccctattttcaataatgtttgcgctatcatgatattgttaaaagtaactgggctttcagacccagttcacttcgttactctttaacttgcatatgtttgcgttggaagtcagcaattgcgccgtattccgtatttaattcccgtgttaatcgaatccagattggtaatagttcgcgataaacttcaaagttggcttcttctggatgatgcacattcgtcacaccaaccatttctttgacagctgatagatcatccactaagcctaaactatacatccctaagacagcagcacctaaacatgagctttcgaaactctctggaatcgtgacgtcttgttcaaagacatccgccaacatttggcgccataattctgaacgggagaagccacccgttgcctgaatactctttggtttacctgccacaccttcaatcatcagcatcaccatgtataagttataaacgatgccttcaagcgctgcacgcaccatgtgcgcccgcgtatgttgccgcgtcaaaccgaagtatgatccacgtgcatctgcatcccagattggtgcccgttcgccacccaagtaaggatggaataagagtccatctgaaccagccggaatttctgccgcaatttgtgtcaaaatatcgtatgttgaaacatgcatttgttcagccttgattttttcaggtgcaaaaagttgatcgcgcacccaacggaagacaattcccccgttattgactggtccaccgaccacccatttatccttggttaaggcgtaacagaataatttaccgtttggatcaaccactggatgatcaacaaccactcgcacggcaccgcttgtcccgatagtaacggcgactacgcctggatcaattgcatttaccccaaggtttgataaaaccccatcgctggcgccaaagataaatggtacttcagcaccaatgccggttaattcaccatagatcggatcaatccctttaacataatccgttggttcgactaattcaggtagttgttggcgtgtgacaccagccacttcaagggcttgttgatcccaatctaaattaaaaatgttgaacaagccggttgctgaagcgattgaataatccatttgatacgtatggaaaagtttttggaagacatacgttttaatatcgatgaattgactagcttggttgaacaattcaggttgcgcttctttcagccaaatcagttttgaaagtggcgccatcggatggattggtgtgccagtgtgttgataaatggcttggcccaacccattttctttcaattgttgacttgctttagcagctctattatccgcccaagtaattgcccgagttagcggttgatcatttgcatccatcagaatcaagctgtgcatcgcagccgagaaactaacgccctgtaattcgccggcttgaacgttgcccttgcgcatcacctgtcgtaatacttctgacactgcattaaaaatttcatccggatcttcttctgccatatcgggtacggtttgatataaaggataaccaacgtttgcgtaagctttaacattcccttttaaatcatataaaaccgctttcgtacttgttgttccaatatccgaaccaatcatatatttcatcataattacctcgtttatgtggtgtttactgactacttactaggataccacttatttcttatcaactgcatggccgccgaattcatttcgtaaagcagcgacaactttaccagtgaatgtatcatcttcaagtgaacgataccgcatcatcaatgataaaccaatgaccggtgttgggacttgtaatttcaaggcttcatctaatgtccattttccttcacctgatgagtgcatgataccttttaagccttctaagttagggtcttttgcaaaagcagattccgctaattccatcaaccagccgcgaatcacagaaccattactccaaaccttagcaaccgcttcgttatcatattcaaactcaccatgtgataacacatcgaatccttcagcgatagattgcatcatgccgtattcaattccattatgcaccattttgagataatgaccactaccagccttcccggtatagagatagccatctttttgagcaatatctttaaaaatcggttcaatctgtttgaagacttccgcgctgtcaccgccgatcatgaagtttccgtctgcgttagcaccgctcatcccaccagaagttccgacatcgaagaaatgaatcccttttgcggcaagcaatgcattgtgttgtttagaatcttcgaaaaatgaattaccaccatcaatgacaatgtcaccggctgtcaatttggtacttaacgtttcgattgtggcttgtgttggcttaccagcaggtaacatgctccacacaattttaggttgtggcaattgtgccaccacatcatcaatatcctttgcaggtaatgcacctaagcgggttgcttcttgaaccgctgcttcatttaagtcaaaggcgacaacctcgtgcccattacgtcgtaagttagcgaccaagttaatccccattttgcctaaaccaatcattgctaatttcatctttgctagtccccttatccacaatttcatgtcacttttattaatgtcttcattatatgtaaattattttctttaatcaaccctttttgagaaaataattttcttagttgctttttatgctatactatcgataacaagggggcacttcaatgacacaaaacatcgattccttactccgtgcgtactacacgaatttaagtgaaaaatacaaacaaatcgcagattacatcttaaaaactgaacatttcaatcaaagtttaacgattcaagaatttgcggctgactgtggtgtttcaacggccactatttcccgtttcgccaaaatgttgaccttcgcaaacttccaggcactcaaaatggcgttacttgctaaacaagcaatcccaacagataatccactcttccatgaaattagtaataatgatgactatctgaccatggccgataaaattttcgcatccaatactaatgcgctcaaagcaactcgttcactactgactgaagcgcaattacggcaagccgttgattatatcaaccaggccaagcgcttaagtttatttggcttgggcgcttctggaatcgtcgctcaagatggctaccacaaatttttacgaactgcgattccaactgtttacagccaagactaccatctacaattgatgcaggccacccaactcaccgaacaagactgtgcgctgattatttcacatagtggtcaaaataaagatgctttagaaattgcacgcatcttaaaagaacgtcacgttccactgattgtcatcaccagttttggcaattcaaccctcgctaaattgggtgatgtgacactgttgtccatttccgaagaaaccaattaccgcgccgaagcactacacgcgttaattgcacaaatcagcatcgtcgatagtctgtttatgatggtcgccgttaataatggcccacaaacagaacaaagtttcaaagccattcggactgaaattgatcggactagacaaaaataaaaaagctgaggttgaagaaatacttcaacctcagcttttttgctgttctattttgaacgtttaaacgtgctttctcgaactgacttttccagttaactaaaaaattggtagtcatcctgaattctggataactaccaattttttattaatgctcagttgctgaacgcaaccaaacgcactctattcttaaacgtgcttttttaaacgcactctatttaatttctgctaatgtcttttcaaggtgggctaggacacggtctttacctaacaattcgattgaatcaggtaatgatggaccatgcatttcgcgggtcgttgcaatccgaattggcatgtacaattgacggcctttaatcttcgtatctttttggatgcctttaatgatttgcataatccgtggtgctgtgaataatgttaaatctttcaagcgttcgctgaattccttcaaaacaacgggtgctgtttcgttatttaattcttcaagcgcttcggcgtctaattgttcaggttcttcaaagaagacatctgacatttcaacgatttgagctgtgtagctcatttgatcttggtataacgcaatcaaatgacgggcccattcgatcgttttgctatcaggattttcagcgattttacccgctttaatcaagctttctaacgaaagatccatgattttgtttggatctgattgtttaacgtattggttattcacccattcgagtttcttttgatcgaaactagctggtgatttgctcaaacgttttggatcaaattgtttgatgaattcttggcgattgaacaattcgctttcgccaactggtgaccaacctaatagggcgataaagttaaacatcgcttctggtaagtaacccaattcgcggtattgttcgataaattgaagcactgattcatcacgtttacttaacttcttacctgtttcagtattgatgatcaatgtcatgtgtccaaagactggtggttcccaaccaaaggcttcgtagacagccaattgttttggcgtgttggcgatatgatcgtccccacgcaagacatgggtgatttccatcaagtgatcatcaacgacaacggcaaagttatatgttggcatcccatcgcgtttcatgatgacaaagtcgccacctaaacgatctgattcaaagctgatttcacctttaacaatgtcatcaaacttgtaaacgtgatccttaggaagacgtaaacgaacaactggttgtaagccttttgctttagcagcttcttggctagccttaatttcatcatcactcataccttcgtattcgtagatgtaacgtggtgcttcgccagctgctttttgggcttcccgttcttcagttaattcatcttctgttttgtatgattcgtaagctaatcccttagccactaactcttcaattaaaggcgtgtaaatttcgcgacgttctgattgacgataaggaccaaagtcaccaggcttatctggaccttcatcccaatccatacctagccacttcaaattatctaactgactgttttcaccgtcagcaatgtttcttttcgtgtcggtatcttcaatccgaatcacgaaagtccctttgttgtgacgtgcaaataaatagttaaataatgctgtacgagcattcccgatgtgcaaatgacctgttggacttggcgcataccgcactcggattttattttttgccataaaaaaaacgcctctttctaaaattatacttgtctactagtttaccgttattatgcctaaaaataaaggctcagagaccactaatccacaaaaaaagaatctaggacaaaagtatgtttgtcccagacccttcttctgatagtagaattctatcatttaaacgtgctttttgaaccatcttcctgcgcttaaccaaatttgccaaatcgacgattacatcgtcaattcgtcaaatccagttaatgctcagaagataaccagttcaaacgcactcttccacttaaacgtgcttacactaactgctttctgcgccttgctacatcagtcacatcaccggctttaccggcaatccgcctgattaggcaaatgcttaaaagcaaaccgttagtgacgcactctcaccgcattaacggagtggtgtccattgccattcttcaacttctggtaaatcagtaccttcattgcgaatgtattgattgtgtttagcaaccatgtcatccattgattgtgcgaattgaccagcttgatcgccaagtacgtcaactgcaacttctttagatagactgaaacgatccatttgattcaagacacgcatgtcgaatggtgttgtaatatcaccattttcacggtagccatgaacatgaaggttatggttgtgacggtcaaagaagatatcacgtactaagccttcgaaaccatggaatgcgaagaccactggtttgtcttttgtaaagtacatgtcgaattcttcatctgttaaaccacgagggtccactttaggtgaacgaagtttcaataaatcaacaacgttaatgaaacgaatcttcatgtcaggatattgtttgtgcaagattgagattgcagccaaactttcaagtgttggttctgtcccagcagctgcaatcacaacatctggttcagcatcttggtctgtacttgcccagtcaataatcttcaaaccattcttaactaagactgttgcttcgtcaattgagaaccattgttgacgtgggtgttttgaagcaaccactaaattgatcttttcttggctcttgaagacagtatccattgttgctaacaacgtgttagcatcagcaggtaagtattcacgaatgaatttaggtttcttttcagctaagtgtgttaagatacctggatcttgatgtgtgtaaccattgtgatcttgttggaaaacagttgatgtggcaatcacgttcaatgaaggatacttgttacgccatgcttgttcatcagccttacgtaaccacttgaagtgttgtgttaacattgaatccacaacgcgcaagaatgattcgtaacttgcaaagaaaccatgacgaccagttaggacataaccttctaaccaaccttcagcttgatgttctgataattgtgaatcaagaacacggccttctgttgccatgtattgatcgtttggttctttgattgattccatccattgacggtttgttgcttcaaaaatatggttcaaacggtttgacattgtttcatcagggccgaagattctgaagtttttattttgatcgttgtctttgatgatatcacgaacatattcgcctaaaacaatcatgtcttgcgcaacgactttaccgtgttctgaattatccacagcataatcacggtaatctggtaagcgtaatggtttaggatcaatcccaccattggtgattgggttagcagccatccgttgatcgcctttaggtgcaatttctgcgatttcaggttttaattgacctgcttctgtaaacaattcttctggacggtatgatttcatccaatctactaatgcatcaacatgttgcatgtcagcactgtcaattggcactggaatttggtgcgcacggaatgaattttcgattggtacgccatcccatgtcttaggaccagtccaacccttaggtgcgcggaagacgatcattggccatactggacgagatgaatcgccgttttcacgcgcattcttttgaattgcttggattttttcgatggcttcatccattgcagcagcagttgctgggtgcatcttttcagggtcgtcgccttcaacaaagattggttcccaaccattgccttcgaagtatttcgttaattcttcatcactcttgcgtgaaagaattgttgggttagaaatcttgaaaccgtttaagttcaagattggtaagacagcaccatcattcttaggattgatgaatgtgcttgataaccatgatgcagctaatgggccagtttcagcttccccatcacccacaacaacagcagcaatcacgtctgggttatctaaaatcgcaccaacaccgtgtgataatgaataaccaagttcgccaccttcatggattgaaccaggtgtttcaggagccgcatgagaagcaacgccgcctgggaatgagaattgtttgaataatttcttcatcccttcaacatcttgagaaatttctggatagatttctgaatagctaccatctaaatatgagtttgagaccatcacttgaccaccgtgacctgggccttcaacgtagaacatgtttaagttatatttattaattgcgcggtttaaatgagcatataggaagttttggcctgagattgtcccccagtgaccaattggttttgccttaacatcttttgcttccaaaggacgtttcaatagtgggttatcttttaagtataattgaccaactgagatataatttgcagcccgccaaaatgcgtcaactttagcaaggtattctttgcttgaataatctgtcattttaatagcacccctttttaattttaaaaaagttcctaatagctttactttaagttccagtcgcagcttttgcaactttgttgtttctgactactctcttatcatactaaactttttaaaaaagtcaaccatttttaatattgggtcgtaccaattttttaaatctaaaaatagcggccctattcgcgaccgctaaccgtaacgaatgtattatatttcatgtattggtagtgcaggcgcatcgttgaaaattcaaacggtgtcccatcgtctaagaagaaaatcccttccatgatgccaactggttccgtcggtttcaactttaagtgtgcttgatcatcatcagttgatggttccgcgaaaattgacaggaaagcgcgtgtgacttcttgatttttctcggtttccaagtagttaaagattgaactcgacacaattttttcggtcaattcgggcattaccttaatcggaatgaagcccgtttcaatcatgaatggttcatcatcaaacaaccggagacgcttgatttcgtaaacaaaatcatctggtttcaggaacaagtctcgttgcaattccgcgctcggcttgatgacttggaaatctaataatttaatccccggtgtccgattaccggctttaaaactgtcggtaacccctaggttagagccattgtaattaaaaaacgagccaccctttaaataaagtggattaataaaggttcctgaaccccgttttttgaaaatgatcccttgattagacataacgtttaacgcacgtttgaccgagctacgactcacttgatagtgttcagtcaacgtccgttcatcgggtaatttcatgctgggaaatgattctgcgttgatcgctttttttaagtccgcgataatattctgataaactaagtcggccatgctaaactcctttataaatcattttatctcaagcttattatacatgattcctaaaagtcgtctacaaacagactcgataaatgttcaattattaatgcaggccaataaaaaaagaggtgctgagacaatgtttattgcctcagcacctcgcgcgctccggatcagactatcttgcaaaaaatgcctcacagcgcctactttttatttaatgtgcttgaaattgggtatagtattctgctagtaattgggcaatccggttcccagtaatggcataattttcagcgggttggttagctaatgaaatccgcaagtagccatcatcagtccccattcctgccccatccatcacaacaacgccgtatttagctgcaagtttatcttcgaaatcaagatagctcacgtgcttttcgaaatagtcgtggaattcatgcccatactttctttcagcaaaatcatagatgttaaataccgcataatattcagcgttttctttagagtgatcacattccatgcccatcgattcccaaaaagcgttgtatcgcgcatcaaccattttcttggaagcttcgatgtatggatccttttcaccttcgtgaattaagctggtcaaactaaatagtgccatcaaaatttgttgtggtgttgataatcccgcggtgtggtacaacgcgatttcacgactgtcagccactgttcgatcaatgaatttcatcgcaagcggattaggcgccacaactgagtaccgtttttcaaaagctgccttaatcgctggttcttcagccgttcgcttagcaataatttcatcaaaaacattatcttggtgcactgctagtaagcctaaacgatgcccagttgccccataaagttttgaatacgaataaactaacatcgtatttcggggggcaattgagtaaattgtttggaaatcattcacaaaagtcccataaacatcatccgtaatgatgataatttctgggtttgcttcaacgacctctttaatcttagctaacgcgtgtttgctgaaagcccgcgaagtggggttcgttggattaaccacaaaaaaggctttgattgtcgggtccttcaattcttcaaacttggcgtccatcatttgccagttgtcatcttcaacggaactcacatcgaattgctttaatttatattcacttaattctgggatttgcaaataaggggtaaagattggggtattgatggcaatcgtgtcgccaggccgtaagatatggctgatcttcaattccttgaacaaataaaccattgcggctgttccgccctctgttgggaagacatccgtttgattagctaatttttcaccattatatagtgacacttcaaggtatttatttaggattttttccacattgattaaacttctcgaaggtactggatagtgattgccaatcgcaccgtcgacaaattcgtgaaccaaatcatcctgattgaggcccatgtgcttttcggtataatctaaaaaggctaatataaatcgatctgttttatgactggcatcaaggtaggcatgcagccgttgtgcaatccctgctttatcaacgtagcccgccatatctccatcagcctcgttaattttcttagcagattcttcgacgccaaattcgacaagcttattaaaagctaatcgcgcccgcgtattaatccagttagggtccccacgaccaacattaattggcgcattatgcattgtatttttttctgaattttctaagaacaaagcggcaacttcaaagtttgacatctcttttaatcgctcaatatctaatgagtgcatcgtttttccacctttttcaattacttgctacattcataatcgcatctaaaagcactttaacgctaattgacagtcaaaataacggctagcattgtaaatttattgtttgatttattatatcgtttttgtctcaaaaataaagcactcattcaaaaatcaaaccataaatgccacagcgattctccaacttcatattgcatcatttaccacaaacctgcaaccctgcggcgggattttttctaatgctgctaaaaaagcacatcatcgttcaacgatgatgtgctttttaaagttttaagcgacgttattccttattttctttgaagaacttcgcgaaatttttgcggtaattgtgcaacatccatttaatcaatagccagcgtttgagattcatatctttgctatattcaaaagtggtgccgtaacgtttttgtttgatgagtgccaatgccttgtctttttcggcattattgcgggcatatttcttaaagacatccactgaaacgcccaaccaaagtgcgggactgtcttcatctttattcgcccaaacaacaggttcatcttgcaagtcgtttgtcacgtaatcgcgcaccacccattgggctaagttatagccgttcaaggtaacaaagaaactactgcggcccatccgtaaattgatgtcgaataacttgtaggtgttatcgcgttcatcatatttcatatcgaggttggcataacccgtaaactcgatatcttcaaggaatttttggacttgttgataaatttgtgcgttgtattccggcaaaatcgccacgtaattcccaatagctgcgggtgctggatcttccaataatggatggcccagacacatcatcttcacgtgatgttgttggtcaacatagatgttcatcacgtgcatccgactgtcatccccaggaatgaagtcttgtaaaatcatgtctgattggtagccattttcatatacttttcgcatgatgtcttggaattcagcttcacttttaatcgtgaaagcttttttgcgcccttcaaaatgcacatcaagccattccacagaatccgccggttttaacgccactggatattggaaaggttgttccacctgattatcttcaaccatttgcttggtaatgatgtgcgtcttgggataaggtaagtcatatttgtcacagatttcatagaaggtttccttataagtcaacttttctagtaaatcgtgatcaatatatggacaaacaaagacatcttccaattccgctttatgttgtgaaattaagctcgcatagccatcaccacagccaatcaaaatgactgggccatcgctatcgcgatagatttcctttaattttagcatttcagtaatgaatccagggtcttcactgaagcctggaatcaattctaaatcgacgatttttgtaaaccgagttggtgctaattcctgacttgcgtaggccttaacaggttcatgatacatctcataaaacgaacgggccatcccgtaaacgttaaaatcgctccccaataaaatgggggtgaagtttttaccgtttgcttgcatgctgtcaccttctatatcaatatttatcgtagtataccagactgccgttcaatatacgtcagctcaggatgctctttgttaaaacttaattagtaattgctacttgttgtatagcccgtcgacaatattttggccgaccactgtcatcggatcaatcactttgtcgggatacaatggaaattccgactgtgcaacactcaattcggtacagcccaaaataaccgcgtcacaatcatagtcatttaacattgtatcgacaattttttgatacttgtcctggctgaatgtcccagtcgccttaatgtcatcataaatcaaactcatcgtggcatcttgcaatgtttggtcgggaacaacactttcaagaccaaaagcagcaattgctttttgatagataccggcttgtcgggttccggttgtgctgagaacaccgattttcttcaagccgggaattgtttgttgcatgtgtttgaccgtttcccgtggcatgtggataatgtcgaaatctgcggcagcttgtaattcgtcgtagaagtaatgggctgtgttacaggtcattaccatgaacttcggcgctaacaaattcatttggcgaatatcttttaacatcacgggcaacggattttcttggctgttgtcgaggatgtaggctgtgcgatctggaatttcagcgtggttgaacacgacgtaattcagataatcttgatccttcttagccggtgttaattcatcgattagatgtacgaaagtttcggttgccgccgtccccatgccgcctaaaatcgtaaacatttcttccatggcaattctcctttacttaattgacttcatttgatgctggttagtccttcttttgaggcctcacttcgatacctaattcttctaattgttccggtgtcacttcactaggcgcattggtcattggttctgtggcccgggaatttttagggaaggcaatcacgtcacgaatattgtcgcgaccagcgagcaacattgcgaaacgatccaaaccaattgctaagccgcctgatggtgggaaaccgaatttcatggcatttaataagtggccgaaacgttcttgagccacttcaggggcaacccctaaaacagataacattttttcttggacttctggatcaaaaatacggagtgaaccgccacctaattcataaccattcaagatgatatcgtatgaaattgcatgtgccttatgtggatcagtatccaacaatggaatatcttcatcacgtggacgcgtgaatggatggtgggctgcaatccatttgccaaagccttcatcatattcaaataatggccaatcaacaacccatgtaaatgcaaattggctcttatcaatcatatccatttctttagcgaagtgtgttcgtaagtaacctaagctatcacaaaccacgtggaagttaccggcaacgattaaaattaaatcatcatccattaagttcaaacgttcaacaagcgcttcttggtaaggtaataagcctttagcagaagcccctgataatttatcaccagcgtatttcgcccacaacaatgacttagcgccgtaacgttcaatgtattgttgttgttcgtctaacgctttccgtgaatatttaggggcggcattattaacgacgattgcgcgcacatattggcccgcttcaacagcttcagagaatggcttgaagtcagaatcttgcacgatttctgtaatatcttgaatttgcatatcaaaacgaacatccggtttatctgaaccatacttgtccattgcatcttgccatttcaaacgtgggaatggtgtttgcacatcgatgcccttgacgtctttcataacttttttcaataaaccttctgtttcggtttgaatttcaacgtctgataagaacgttgtttcaacatcgatttgtgtaaattctggttggcgatccccacgtaaatcttcgtctctaaaacaacgggcaatttgatagtacttatcaaagccggctgacatcaataattgtttgaagagttgtggtgattgcggtaatgcatagaaactacctggataaacccgtgaaggcaccaaataatcgcgtgcgccttcaggtgttgaactcgtcaagttcggtgtttcgatatttaaataaccattgttatcataatagctgtgaactgcacgagtaatcgcagcccgtgttttaatggcattttgcatttctggtcttctaagatccaaataacgatacttcaatttcaaatcttcagaagccgtattgttatctgaaatttcaaatgggagggtttcagctttgttcaagaccactaagtctttaacaatcacttcgattttccccgtcttcatgtctggattaatggccgcttcatcacgcgccatcactgttccttggacttcaacgacatattcactctttaatttacttgctacttggaaaatatctgcatctgtgtcttgattaaacaccaattgaacgatgccttcgcgatctcttaaatcaacgaaaattaagttcccaaaattccgttggctttgaacccaaccatgtaatacgacttcttggttgagaaattcttccccaactaatccacaatatgttgttcttgttctcatatttgccaatcctctctgaatctacattttataaaaaataaaaaaagcaccctcgtctttcgacaagggtgctttgcgcacggtaccacctttaatttcagctgttgataacgctatctgctagcgggatattcatccaagcctcaaaagctgtcaactgaaatcaataagtaactttcaacggggttactctctctgtgattgatcgctaaaaccaagtactttatcgatggctacattttattataatgtccaaaatatatcacaaagccctttaaccgtcaagttttgcagttggattgagctagctggattcgaactagcgtatgacaggatcaaaacctgttgccttaccgcttggccatagcccaataatgcggcaccaagattaagttggcgccgtaaattgattgaattgaaacgtgctttcattaactgctttctgcgttttgctacgtattgcaaacaatcagctgcgctgattattcacaacactaggcaaatgctcaaaaacaacccgttaatgacacaatctaaacgtgcttttgatgacaacaatttccgcttaatctaaaattcccaataatcctaaaaacccggattattgggaattttgtattaatgctcagttgttaaccgtcatcaaacgcactctaaacgtgctttgacagccatcttcttccggttagctacatcagtcaaatcaccgactttgtcggtaatccgcctgattaggctaatcctcagaagataaccgactgcctgcgcactctttaaattaccatacaaatagtccgactgttgctgctgaaagaagtgatactaagattcctgatagcaacatgtagccgacgtttttggcaatcatgtcgttcttttcacggtccacaaggcctttgaaggcgccgatgatcatgccgactgttgagaagttggcaaatgatgtcacgaagaccgttaagacagcttggtaatgtggtgcgaagctcccgattgaatgttgaactttacccatgacaacgaattcgttggtcaccaacttcgtccccatgaattgtgcaaattcaaaagcgtggtgcacatcaagtcccattaaccatgcgaatgggaacatcacgattccaagtaaatgttcaagggtaatccaagggttcactaattgaagcaccttgtcgatcaaggcagccaacgcaacaaaggcgatgacgtttgccgtgataattagaactaatttaccagcatttaagattgaatcacctaagaatgagaagaatggttcacgttccactttgccttcaaccatttcggttgcttcaacagctgcggaaccactcccacccattttagcaatcgtatcttcttcgggtgtgactttcactgggtttaaaatattggtgacaataatagcgttaataatgttgaccggaatcgccgttaaaataaattggcccggcatcatttgtgtatatgcgccgatgatggaagctgtcacacagctcattgacatcatcgcaagtgttaatgttcgttctgctttcatttgtttcaattgtaagcttgaaacagctaatgcttcggtattacctaaaaacatcatttcaactgcaaagaatgattcaaactttggttgtcccgtaatcttagctaacccacggcctaaccatttaatcacccaaggcaagaccccgatatacgttaagatatcgaataatgggataatcatcaagattggtaataacacgctagcaacgaaatccatttgtttcacattgacccaacttggtagtgcaaaagcaatcccagtataggcaacttgcactaaccagttaaagccgtttgctgcacctaaaacaatatcccgcccgattgaaaaactcgttaaaaaccaagcaagcactaagttaatcactaacatgattaagacggagcgccaatcgatttctttctttttctttgagaacagaaagccgactccaataaaaatcagtaatccaacaacatttacaagcaaatacacgacacgccacatccttcatttgtctttttcgtaccgctttaaataataccgttcccccttgtaaatgtaaactattgttcaccccctaattgcataaataatcacttgttaaacgcaactaatttagtccacaaaaaaagcggtccccttttgcaaaggaccgcttttccattcatttttaatagcccgcattccactgatttgtagactgttgcatttgccaagtattggtggtgttactgtaatcgttgttaccactataagttgcactgttcgagtagccatagttactttgcgtcgtcgttgcagcactcttttcaccattcatgacactttcagaataaaccgtaaactcttgatgattttcttcacctgtaaagttggtattcaaatcgttttgtttggtttctgcgttgttaatcgttgttttctctaatcccagtgacgttctcaagacatctgaaacgcgttggatttcttcattggttggaatctgatacgaactaccatcaatatcagcattacgtccagttaaaacatcagactcaattgatttagctgcctttcgataattttcttgaatcgctaccatgtcatcaaaactgaggttagtggcaacactatctgacaaggagtctaagatagattcaaagttggtcaaagatttaagcgagactgcagaattaatcatcgacgtgataacttgtttttgccgtttttgacggccataatcgccttctggatcatcgtaacgcattcgtgagtagtctaaagcggcttttcctttcagatgcatcttgcccttagtaaactcgctcccgttccattcgaacgtaaatggtacgtcaacatcaacgccaccgacagcgtcaacaatcttcgataagccccccatgttaaccgtgacatagtaatcaattgggacatcgaacatcttttcaaccgtcgacattgccatatcagagccaccaacattataggcagcattgattttttgcatgtcgaacttctctgcgccttgtaattgcgctagcgtatcccgaggaatgctgaccaacttgacctgctctttatctggattgactgtcgccacaatcattgtatcggaatttcctttatcaactcggccctcagcaccagtatccactccgagtaataaaatagagaatggttttttatgtttaatcgttttagcggcttttttagtcgcatttggtttataaattttattcgctgcagacttcacttgattactgatgcgtaatgcatacgcgccgccaccgaagaggactagcgttagaatgagtatcaaaactttcatcgtgcgatgctttttaacttttttgtagtttgcttctcgagatccgaaaaatttagaattctgcataggtgtttcccttctattatgtatcataccggcattaataatgttatgttgctattatagcggaattatcatttcaaacaacgccttttaagaaaagttacacaattttaataattccttcaattgttgaacaacactttcctaagcgcttttatgctaaaatataaacaattagtcttaattatggagggttcatatgtcaactcaacaactccccacccgcaatgctgttccagaaaagctcacatgggacttaaccacgattttcaaaaatgatgcagcttttgaagtagcctttaagaaagttaaaacgcaattacccacactcaaaacacttgatcgtccgtttgaatcggctgatcaattagtcgctacaatcgaacaaatcttagccactttccgccagctcgaaacaatttacgtttatgctagcatgaaaaatgatcaggatactgctaacgcaacttatcaaggctatcaagcccaagtggacagcttagcggccgaagtttcagcagcagcggcctttttagagcctgcgattcttgctattccggctgggcaattagcagattggcttaccaagacgcctaatttagcagtttacagccatttcattcaaaccattaccgatagtcgagaccatgtcttatctgggcaagaagaagccttgttagctgctgccggagatatcttcagtgctgctagtcaaaccttcagcgtcttagacaactcggatttacaattcccagaagtgactgacgaaaacggacaaacgtttcagctttcagacggggtctacagccaacttttgcaatcagccaaccgatcagtccgccaagcagccttcgaagcactttacaaaacttatggtcaattcaaaaatacatttgcgacgacgcttgccactgaaatcaaaggtcataattacttagctcaagtccatcactacgatagtgcacgccaagcagcgctagcacccaaagcaattccagaagccgtctatacaaccttggttgatcaagtgaaccaacacttaccacttttacatcgctatactgaattacgcaaaaagcaacttaatttatctgaattacacatgtttgatctctacacaccacttttaggaaaacccgcattaacctacacttatgagcaggcgcaagcaactgccaaagaagcattgtcgatcctaggacccgattacgccaaacaagttgcccatatttttgatgaccgcttaatcgatgtttgtgaaaaccaagggaaacggagtggcgcctattctggcggcgcttatgacaccaatcccttcattttattaaactggcaagatgatttaaacaacttatacacattggtccatgaaacggggcatagtgtccacagcgccttcacccgtcagacccaagattatgtttatggcgactatccaattttcgtggccgaaattgcgtcaacaaccaatgaaaatctcttaacggaatatttattgcaaacacagtctgatcctaaggtccaggcctatctattgaactactatttggatggttttaaaggcactgttttccgtcaaacgcaattcgctgagttcgaacatgcgatgcatgctgccgctgccaatggtcagccactaactgccgagttcatgtcacaacaatatgcggacattaatagccgctactacggacctgccgtcgttaacgatccacagattgcccttgaatggactcggattccacatttctacatgaactattatgtttaccaatacgcaaccggctttgctgctgcaacgactctcgctaacggtattagcaccaaacagcccggtgctctcaatcactatttagactacctaaaagctgggagctccgcctacccaattgaaattatgcaacaagccggcgtcgatatgacgagtgccgactatctcgaacgcgcttttgcagttttcgaagaacgcctggatcaactcgaagccctactcgctaacctaaattaagcctcatgaaaaaacgtcctcaatgattgaggacgtttttttaacggctaattcgtcgatgatataacaatgcaataaagtaaaagccaaactcaatcgtggcgatgaagaaggtcactggccagttcgttagataaccaagccataaaccgagccaaacccctaataacgctgcggcaaccgagattgccaacatcccgggtacgctcttcgctaaatatttagcaatgaacgccggaatcgtaactaagatgaatactagtaatgaccccacaatctgagcagcaatgctgacactgacggctaataaaattaagaaataaatcgatagtaagttggtctttaaaccttgtgcttgagcgccaatcggatcatatgaatcaaataccaagtaccggtaaaagatcaacagcccaatcataattgccccagataagatgattaattgataaacatctgctaagctaatgccaataatcgaaccaaataaaatattggtagcataactagcatttcggtttgaaagggataaaaagagaatccccaaaccgacaaacagacttgaaatcgcactaatcgacgcttctcgccgtgattctttggcactcatctgaccaatcgtgattgaactgagtaacgtgaacaataacatcccattcaatggtgcaattcccatgaaaaccccaaatgaggctccggcaaatccaatttcagatagggtatgcgctagaaatgacatgttccgcgcaacaacaaataccccgattaaaccgcaggtaattgcgataaaagtactggcgacaaaggcatgccgcataaaatcaaaagttaacactcgcttatcctccgctttaatctaattccaaattgggatccaactgactcattggtccggcttcatattgacctcgttttaaaaataggtattgatccgtgtatttccgggccaattctaaatcgtgggtcacaaaaataaccgtcaaaccatgttcccggttcaactctgcaaccaaggccatcacttcttctttagtttcaatatccaaactcgctgtcgattcgtctaaaatcaacaagtctggtttactgattaatgcttgggctaaatacgctttttgcttttcaccaccagaagcattccccatggtcgtcttttgcaacgcggttagatgggtctgttctaaaatttgatcaagcgcttggcgttctttgcgcgatttccacggtaagtggctatcaagttgattcaaactcacaaaactacgaatggacaacggatattcagcttctaaatttctaaactgtggcacataaccgatgtttagcttttgcttatccgggttaaaaacgagttgtccttctgtcggttgtaaattaccgattaataggcgcaccaaagttgttttgccaaccccgtttggaccgattaaactcgtcatgctaccacgtttgatcgtaaaactgagatcttttagtacttgtcgattactaaaggcaagccctaaatgttgtgcattcactaattctgtcattttgaatcctgagcctttctaactgcatcaaattgctgttgcatccatgttaaatatgtttttttagcgggtagtgtttcagttacttgtacaactggcaccccttctttatccgctagttcgtgcatttgtttaataatgggactttcttcttgcttattaatcactaaaaaggcaatctgatgggttttaattaaatcccgcatcgttgtaatatcttttggtgatggatcggtcccatcttcaattgctttggcaaagtgttggttagcgactttgtaacccgtttcagccaatgcatagtcaaaaacgggttcactaacagccacttgttttcctttggcctgcgcctttagttgttggagttgtgcgtctaacgaagctaactttttaagatacgccgcaccattttgctgatacgttgccttatgtttcggatcgcgcttgctaaattcagtcactaaccgcttagtcaatgttggcatcgtctttaaatcataccataagtgttcgttagcgccattagattgtttcattaattgactgactgtcaacacagtttggtcatctggttgggcactcttgacgactttgtttaaccagctgtcgtaaccaagcccgttttgaatcacaacatccgctttagccacgagtttagcatcattggttgttgcttcgtatgaatgtggatctaaactgggactattgataatcgacgtcacgtgaccttgattacctaaaaccgcttgtgcggcctcaccataaaaatcgagtgacgatacaacttgaatcccactcgcctttttcgtactctgaccacaaccagccactaatagcattagcagtaagattcccgccatgatttccaaaccttttttacgcatctttttctcctcttttataaatcgtaattattacgttttactaaaaatattttacacgagtctcactaattgtcaatcatttttctgaaaacacttaaaaagggattgggacaaagattgcttttgccctaaccccttttttgaattattgaactttaaacgtgttctgtaagtcattctcctccggttaaccctgagtcgcaaacaattactacaattattcacgctctgtgttaatcctcggagcatcccgacttacgccacactctttaattaccagatttgttccactgcacctgttgcttggacaacaaaataacctgcccgtggttgatcttcgtttggtacgtaaatattaatgagatagccttgttgcccaccgcgtgtgattaagccattattcaaatacgatgcggtttgaccaaattgtgagccaacttgttgaaccaccaatttaatcgcttggttgccatctacggcagttgtttgttgtggtgtcgtggtagtcgttgttggtgcactgctgctagattggctcgcagattgactactgctacttgccgttgtagcagttgatgatgattcagcaacacttgcagttgatgaacttccttgtggggactctacttcagttgaagatgccagcgccgctttggagctcgcttttaattggcttgcactacttgaaagttcactttcgcgttttgcaacgctactttcacgtgctttaagactagccgtggttgaactttgcttggcatcagcatcttgatttgccgtactactttgaccacaagcccctaataatagtagtcctgataccaaaactgtactaactgtaaccatctttttcataataccccctccaactcctattgattcatctttattctacgagacccacctcagaatagcaattaaatccacatctgatttaaaaatctttaagaaacacgctgattagcttaacttagcagccacttgcttggcaatcaccatatcagttgggtatggtgtatcgaccccgcgtactttctgataagcatcggcccctttagccgctaagacaacaatttcgcccggtttactttccgtaatcacctgttcaatcgctgttgcacgatcaatttcgatggtggttgtcaccttatcctggtcaatccctgccaaaatttcagcggcaatggctgctggatcttcaaatcccggatcatcagtcgtcaaaatggcccgatctgcatattcattaaggacctgtgcaaacccagcacgtctagaaacacctttatcgccaggactaccgacaacaactagtaggcgtggttgattgtattccttttgcaagaagctcaagagcgccttcatgctggcataattatgcgcgtaatcaacatatacttgaccatgtcctggaacggctaaggtttccatccgtcctggaatctgcaagtcgcgaattccttgttgagctgcgattaaatccgcccctgccaaaccagcaccaatcactgcagctgtcgcgttgctttcattgaaatccccaattaaacgcagttggtaatcaccagaaacaccaagttgaatggctcgttcagaagccgcggtaactttaaaccgactttctgctaagcccgtttctagattttcaaagcggaaatcaaccgccaccggaattgtaggttgataatccgtttcggcaaataagtaaattgattccggagcagtcgtcgtagttgctgcagcatacacatccgcaaaatattgcgtttgcgcgttaatcacacagtgtcgtgagttgaccaataattgtaatttgcagtgtaagtaatcttcgaaattaggatgttcatttggtccgacgtgatcaggcgaaatgtttaggaagaagccaacatcgaacgttaagccgtacactcggtttttcttatacgcctgtgacgaaacttccatcactaagtgcgtcatcccgttttcaactgctttgcgcatgtcgcggaataaatccaaactttctggtgtcgttaaattcgatttgaagcgatcctctggtttaggccctaagacacgatcaattgttgaaaataatgctgttttttgacgggtcgccgcttgtaaaatcgattgagtaaagtaggccgcagttgtcttgcctttggtcccagtgtaagccacgataaataaatcatcttgtgggtaatcataaaaagccgctgataaaaccgccatcgctttttggacgttcgtgacgattaaggcgttcatcccgttgccttcaacaatcgcttgttcggcaacatatgttacggcccctaattcttttgcatttgttaaatagacgggacgaaaattccctttacagaaaaagagcgtgtcctcagttacctgccgtgaatcatacgcgattccggtcatatttaaagtcgggtcaccattaagcgccacacttttcaataaatgatgctcttttagaattaacgtacatgcatctaatgttaaagccattttcgtcctcctcaaaatccttgtgaatggttttaattatagcacgatttaatcatgctgcgcttgaaacggcttataatcgtagccataaaaaaacgcgccaccgttaagtgtcgcgtttcaattccaactaaaataggttcgtgaaaaattctttgatcccttcaccgattaaaacaaataaattggctttggggtccgccgttttagtgcgtaattgtgattgtggcgcttgtccgatataccgcgtagtgacaccgttcaattgtggcatcacttgaccaatttgcacattctttttaataggtgcttccaattggcgttttgcaccacctttgactgcttggtaatgccagtcaatgttggctgctgtggttccttttggcacccacattgaaatagctttgttcgtaatcaattgcactgtcttttggcgaccatatttaaccgtcgctgtcttataaggtgcgagactctgattggcttgtgctaattgtttttgttcccaaccatcgaagacatattgcattaacttgttagtttcaatgaaccgccggccagtatcttcaccattggcatgcatcaccactgttagaatccgttgcccatctttcgtcgcagttccggtaaaacaatcgcctgctttgtccgttgtcccagtttttaaaccatcgaccacgtagtcttgcggtgcattattttcgccaggtaacattaagttccacgttgacatggccgtttcatcacttgtttgggcgccaaatgtaaaatgcgcttgcttggttgtttcaagaatttcaggataatcagccaacaacttttgcgctacaagtgcgacatctgccgcactcatttcattttcagcatcagccggactgtctggataaacttcagcgccgaggaattcattgttcaagccggacactgaataaagttgtgcgtcttgaatgccccaatccgccactttttgccgcattaaatcgacaaaatccttttgtgaaccggccacttggttggcgagcatcatagctgcatcattcgccgaagcgaccatcatggcttggaaaagtgccttgacggtatattgtccgtccgcttgtagaggcacattcgttaaatccttattttgactcaattgataaatgaggtcatcgggcttcaccgtttgttcccacgttaacttaccttgcttaatttgcgctaacacgatgtaggctgtaatcatctttgtcatcgaagcgattggcaacgcctgatccgcattttgttcgtataagacttgtccagttgctgggtcgagcgcaattgctgcactcgcatcgatttgaggggcggtcggcaaactcaccggcgtacttgccgctgcgactttggtagtctgggcactcaaaagaccgcccacgggtgcaattaccaatacgaccattacatattgtactaattttttaaacacaacattactccttaactgattttgcgccagcagtttgaggatcaatccgccgacctaacttcaaaggtaagtgtatcacaaagctggttaattctggcgtcgaatcagcataaatataaccgccatgtaacgcgacaatactttgggtaattgctaacccaagtccagtgccacctgtttcttgtgaacgcgatgcttcaacgcgataaaagcggtcaaagagttggttcaatgaatcacttggaatttgttgaccatcatttgacactttaataatcgcctcttggccgattttctcagccgccaacgtaatttgtttgccacccttgccatatttcaaagcattagcaattaaattattgaagactcgaccaagcttttcagtatcggcttccatcatcagtggtgcaggattacaagttacattaatctgcatccccttcttattcgcttctaactcaaaactggccgctaattgatctaacatctgctccatatcaaacgttgtcttggtaatgggggtcgatgtttgccgcaccttcgtgtattcaaataaatcctcgactaagaccttcatttgttgcgccttcacgaaagcggtatgcgtatatttggttagttcttccttggtttgatactgattatcttcaattaaaccaagatatccgatgattgaagtcagcggcgtccgcaaatcatgactgacattggtaatcaattcgtccttactcttttcaatcttgcgttcttcttccattgaacgcacagtactatcaaccagcgtgttcacactatcgatcacgcgttgcaaatcacggttgacacgcaaattaatccggtggtccaaatgaccatcggcaatgtaatgcaactcaccaatcacgtgccacatctgcatttgatggtaacgccgaataagccgccaatagacgactaacacatcggcaacccccatcaagatgacaaaccaattttgccaactccaaatatgcgattcattcggaccaattgtaatggcgtttttaatcatccatacgccgccgcttagttgcggattattcacaatcgcctgttgtaacagcaccatgattgataaatttaatagtaataacaaaataaccgtgatgataccctcggcaaagagttcgctcttttccttagcggttagtgccactttttgcaggttcttttctccttgatagtcagccattaaacttctaccttatacccaacaccccagacggtttcaatcactttttcaccatcggttgcttcctcaattttgtcgcgcaaatgacttacatggaccatgaccgtcttggcagagacgatactttcttgtttccagacccgttcaaaaatatcgtccgctgaaaagacccggttggggtgactggcaagtaagtataaaatcccaaattcaagtgcggtgagttggatttgcttgttattaatcgtcgtcacttcatgtgagtcgcgcttaatgataagcggaccaacttctaagacatccggcacttcgttggccacttgttgttggctccgccgtaacaatgacttcacccgcgccatcacttctaatggattgaatggttttgaaacgtagtcatctgcaccggttaggaggccttgaatcttgtccatatcagttgtcttggcagacaccacaataatgggcacttgtgaatccttacggaccgccttaatgacttcgataccactcatattcggcatcataatatccaagatcatcaaatcaatatcgggattcgtggcaattttagtcagggcttctttacccgtgaaggcttgaatgggttcgtaaccttcgtttttaacataaatacttaataattcaacaatttctttatcatcgtctacaattagaattttcataatcgttacctcgtttaatttaacatcattttgcatgattcgctttcattgtaacaaactatcttctacttagggttaaagaattctttaaatcctccccatcatttaaccacaaaaaaaggatttaagtcgtgcaaaacgctcgacttaaaccctgatagaaatgatttaaattaccgtgctgaatagttaggtgcttctttggtaatttgcacatcatgtggatgtgattctgtcaaaccagcatttgagatttggacaaattgtgcattatcttgtaggtcctgtaaattagcagcaccaacgtagcccatccctgaacgtaagccaccaagtaattggtaaattacatcgccgagtgcgcctttggcagccacacgaccttcgatgccttctgggactaacttgttggcttcattcacaccactttggaagtaacggtctgatgaaccatgcgacatagcagccaagctgcccatcccacggtatgttttgaaacgacgtccttgatagatttcaaattcgccaggtgcttcgtcagtcccagctaacatactaccaagcatcacaacgtttccaccggctgcaagagctttaacgatgtccccagaatatttaatcccaccatcagcaatgatggttttgccatattcgcgggcaacactggcagcatcgtagatggctgttaattgtggtacaccgacaccagccacaatccgagttgtacagattgaaccagggccaatccccactttaacgacatcaaccccagcatcatacaaggcttttgtgccttctgcagttgcgacattcccagcaatcaaggttgcttcagggaagcgttcgcgaatttcactaatcttacgtaacacaccagctgaatgaccatgcgcagtatcgataatgatcgcatcagcccctgctttcaataaggctgcagcccgttcaaaagtatcgcttgtgacgccaacagcggcagcaactaataagcgaccatattgatccttagccgcattcgggaattcttgcactttttcaatatccttaattgtgattaatccggctaagcgaccgtcatcaccaactaaaggtaacttttcaattctgttttgttggaggatttgttcagcttcttctaaagaagtgccgacaggtgcggttacaagtgcttcgtgcgtcatcacggttccgatttcagcagagaaatcagagataaaacgtaaatcacggttcgtaataataccgactaattttagatcatcgagatttgaaacgattgggacaccactaatacgatatttacgcatcaaatcttcagcagcactaacgggtttatccgctgttaaataaaatggatcaataataacgccattttctgaacgtttaaccttcaagacttcatctgcttgacgttcaatactcatattcttatgaatcacgcctaaaccaccttgacgcgccatagcgattgccatgggtgcttccgtaacggtatccatgctagcactcataattggtgtgtttaacttgatattctttgcaagttgcacccctaaatcgacttcgttggggagtacatgactctccgcaggtattaataaaacatcatcgaacgtaaaccctttttttgtaaactttgattcccatgcagacataatcttcctccaatttgtgaactaaattaaccgccgacccatcgattgttcgtattatctttaatcgataaccagtttaaaatttgataaaatattagcagatttttctgcaaacgtcaataaactcttattgaaaattcattttcatcaatatcgtgtacgaatgaatcacgaacatttaaaataagggtgcacaccacccagcttcgttatacaatagaaataactgattataaaggatggattggcatgcaagaacaacaacgggttctagatttaacacgaagttataacctacgcgaattaggcggttaccaaacggttgatggcaagtccgttaaatggcacaaattattacgttcaggtagtttgaacgcgctaaccgcaactgatattgaggatctcttaaattacggtgttgcttacgatgtcgatttccgttcacgtcatgaaatcaaggtcgcccccgacccatttgatgacaaccaactaacctaccatcgtctttcggtatttccattcactgaccaagccgatacccctaaaaagccagccaaaaaaggcctaatgcggctttttggtaaaaaagaagctgctactcccgaacgatcaagtatggaccggatgtaccaacaattggtcaccgactcccatgctcaagcagcttatcgcgatttatttaccgtactattaaataatcacgatacaaacggtgcagtcctttaccattgctcagccggtaaagatcgcactggtgtcgcaacttttttaattctaagtgctctcggcgtcgactggaaaacaatcgttgccgactatgtcctctcaaatgaggtcctaggactcagctcagcaaccccaacccgaatttcaagtaacgatagccaggtcgcttcaatgaacgctaagagcattacacaggctaatctagaacttgtccgcgacacgattaatcaagaatacggcaacatcgaaaactacctatcaaaggcaatggccctcaaaccagaagaaatcaaacaattaaaagaggactacttagaatagcgtgcgactgcaaatggttatccgctgaggattagcctaaaaaggcgaacacaagcaattgtgttcgcctttttgaatgatcttttaatgactcttaatataattttcgccatccgctgctggtgcgacggccttgcccaagaaaatcaccagaataataatcgtaatcgcgtatggtgcaatctggaaccagacactattcacaccggccagtattgggatgtagccgccgataatcggcaaactttgtgcgagtccgaagaaaatcgatgcacctgtcgcgccaattggatgccacttaccaaaaatcatcgccgccaatgccatgaagccctgacctgaaatcgtcgctgcgctgaagtttaacgtaatcgactgcgccatcaccgcgccaccaatgccgcctaacaaaccagacaacatgaccccgatataccggtaacgactcacattgatgcccagtgtatcggctgcggctggattttcaccgactgaccgcaagcgcagcccaaatcgcgttttatacagcacataccaactgataatgccgaccaaaaccgcagcgtaagccactaacgacgtcttcgtaaataaaatggggccaatcactggaatttgggccaagccggggaatgtgaagttaccgatgctttgattaatcaccggcgtttgccccttaccgctatacagcacacgggttaagaagacacacaatgcaggcgccaataggtttaacaccgtcccactaataatgtgattagcgcgcaatgttacggtcgctaaagcatgtaataaggagaacagtgcaccaaacagtccaccaaccaataaggcaatccacggcgtcaatccgccaaaaaccgtactaaattgaagggtaaagacggcactgctgaaagccccaacaatcataatcccttctaaaccaacattaatcacaccgctatgctctgaaaaagcaccacccaaggctgtaaaaatcaatggcgccgcgtaaactaacgtggtcgcacaaatcgtcattaaaatcattgtgattgtcattatttttcaagcctctctttcatcaacgcgtgttttttcagtaagcggtgattgagtaattgttcaaataagaagcgcacacccacgaagaagataatcgatgcaatcacgatattgacgatttctgtcggagttgttgagtagacggaaatgcttaagccaccaatctgtaaagcagagaataaaatcgccgcaaagataatcccgattggatgcccattcgctaataacgcgaccgccattccattaaagccgatatctggtaaggcatttgaaacggaaatattttgataattccctagaccatcgacagcccccgctaacccagctagtagtccagataatagcattgcccacataatcgtttgtttcgtattcatccccgcgtaacgtgcagcttgttcgttcaatccaactgccttaatttcaaatccagtcttcgaccgtttcaaataccaccacatcacaatcaccaagactaacgcgatgaaaaagccccagtgaaacgttgagtgattggtaatctgttccaaaaaaggggtccgcaagcttgctttagggacaatgttggccgatgagtcgctgccttttggcgccaaccaacgtttaatcgcaaaattgacgaaatacaatgcgatgtagttcaacatgatggttgtgatcacttcactggttccaaagtaggcccgtaaaaaaccggccaaccaagaccaaaagccaccgagcagcatccccgctaaaatcgcgccaagaatcaagagaatccccggtaaatttttaaagtggagtgcaaagacaatcgcgccaaaccagcccactaatagctgacccgacccaccaatattgaaaaagccggctttgctcgcaattgaaaagccaagggctgtcaaaattaacggagtcgcattgcgtaatgtctcgccaatcgaatagatatcgccgaatgcgccattaaagaggttactgtaattttgaataggcgaatatccaaaaaccaacatcacaactccgcccactaacagtcccgccacaacggataggattgcaatgattaatcctgaagattgttgtttattcattcgtctcgccctcctactggttgttgcccggccattaataatccgagcgtctgactcgttgtggtttgtggatcaacttcaccaacaatttgaccggcgtgcattacaagtactcggtcagctaactttaaaatttcatctaattcaaaactaacaagtaaaatcccacagccttggttccgttgttcaatcaagctctgatgaatgtattcaatcgcacctacatcaacaccgcgggtcggattggcagcaatcaagacttttggttgtttggcgatttcgcgcgcaaccaccactttttgctgattgccacctgaaagttctccggcaagcgtttgttcagattgcgtccgaatgtcgaatcgtttaatcagtttctgcgccgtttgattgatcacccgataattaagccagcctagatgactatacggttgatggtaataatccttcagcgctaaattttcagcaatcgacagtggcaaaatcaaaccgatattctggcgatcttctggaatgcaccctaagccttgttcactaatttggcgtggtgtccgtttcaataatgactgacctgctaattcaatttttccagactgcggttttaattgtccggttaaaacctgaattaactcactctgcccgttgccatcaatcccagcaattccaacaatttctcccgcatgcacggtcaatcccagatcatccagaacagtgcgtttagcaacacgagcagcgacatgttccaccgatagcatcacagcgccttgattagccattttcggtgtgggggcttgttgcggacggccaaccatcatttccgctaattttgtcggatccgtttgtgcgactagtaccgtatcaatcacacgtccggcacgaatcacgacgcaccgatcagcaacttgtttaatttcctttagtttatgcgtgataaaaatcaacgacttcccttccgcctttaacttctcaaaaatggcaagcaaggcttgaatttcattcggtgtcaaagctgcagtcggttcatcaaaaatcaatgtcgttgcttctcggtaaagcgccttgataatctcaacccgctgttgcatcccgaccgaaatatcagcgatttttcgatcaaggtcgagcgccagttggtatttatcgactaaagccgtgaccttttgccgcgccgttgcatagtcaatccggccctgtttagttggttcgtcacccaggataatgttttctaagaccgtaaaagccggaattaacatgaaatgttggtgtaccatcccaatcccgagggcttttgcatgtcgagggccatttaaggtcactgcttgtccgttcaccagtaattgccccgcagtcggctttaattgtccggtcaaaacacccatcaaggttgatttccccgcaccattttcaccaagcaaggcaaggatttcaccctgttgcaaggttaatgaaatatcatcattggcggtaaaggcgccgaaccgttttgtaatgtgctgcatttctatcacagtttttgccatttttacgctccattcattaagcatacaaaaaggatggctgataactgctgccatcctttagcattcaatagtcgttattctgcagcaactttaatggtgcctgattcaattttttgttgatattctttgactgcttgccatgtttcaggggaagcattgtcgttcactaaggcaacgcctttgtctttcaaatcatatgtgacggttttgccaccagggaatttatcattcttagcttggttagcaagatcttccactgctgtgccaacttgtttaacggcagatgctaatgtgacgttgccaccatcatatttcccatcggctttttgatcttgatcaacaccaatcacccagactttttgaccacccttagaaatgttcttagcagcggtaaagacgccagcgccagtgccaccagcagcgtgataaataacatccgcgccgttgttgtacatcgcggttgccaatgattggccgacatcggctttcgtaaatgaaccagcatatttcacatcaacggtgattgctgggttaacggctttcaccccttgtttaaaaccagcttcgaatgttttcacgacggcactatcaattccaccgacaaagccgactttattcgtcttagtggttttcgcagcggcaaccccggctaggaatgatgattgttctgttttaaaattgacggacgcgacgtttttccgattcttaacgtttgaatcgatgattgcaaagttaacatttggattattctttgcagattggctgaccgcgttatctaacttatagccaatcgcaaaaattgtttggtattttgccttgattaacttattaatgttcgggaaaaagtccgcatcagaactcgattgtgcgtaattgtaaccattgaccccttttttaagatcatgactagcaccccatttttccaaaccttcccaggcagattggttaaaagatttatcatcaatcccaccaccatcagtgactaaagcggctgtgtgcgttgctttctttgatgctgtcttttgactcccgcacccggctaacacgccacctaatacaaggactgtcgagaaaagtacgaccaaactttttttcatgaaataagcctccgtcaataaatttgataatttattataaacacgttatcgacataaaatcaatacatttatttcattttataaaatattgttcgtttatattgtatttgttgctaagaaatatagataatgctaatattaattgataactaacgaacaatcaggaggcgaaccatgcaaacacaagtctattttaatcacgatggcggtgttgatgatttgatttcattaactctgctcctacaaatgccgacaatcaaactacttggcgtcggcgtaattggcgctgattcatatgtcgaaccagccgttagcgcgagtcgtaaaatcattgatacgttttcagatcaatcagcgcggttagctgtggccgcttctgactcacgcgcagtccatccttttccaaaagaatggcgaactgacgcttactcagtcgatgcacttcccgtgctaaatgaacgtggcaccgttcaaacgcctctgagtcctgaagccgcacatctcgatctaatcactaaactcaatcaagcaaccgaacccgtcacattgctctttaccggcccattaactgacttggcacgcgcactcgccatcaatccaagcatcgaatataaaatcgctaaacttctttggatgggcggttcttttcttgaacaaggcaacgttgctgaacccgattctgatggtactgctgaatggaatgccttctgggatcccgaagcagtgaaaactgtcttcgacacacaaatccctattgaattagtcgggctcgaaagtacgaataatgttcccttaacgccggcgattcgccaacgttgggctagcaaacgtgccaatgccatgatggactttatcggcacctgttacgcctttgttcctcaactggtccatttcaaaactaattcaacttattatttatgggacgttttaacaacttgttaccttcttgatccaacaatcgttaaaacaaaagccattgtatgtgatgtcattccaaacggaattgccggcgggcgcacgttcttaactaaaaacggacgtccggctaaactcgtctacgacgttgatgcagctggattttttgatctaattgaaaccatcataaaagcagactaacgcaaaaaggagcaccgacttatcagtcagtgctccttttttgaacgtgctttcatcaacagcttcctgtgctttgctacacttagcaaagcggtgcttgcagcgccaattcgctaagttaggcaaatgctcagaagctacccgttgatgacgcactccttttttgaacgtgcttgctaaactaggggaacaactttgtaaaggggctgtttgaatgacgactgatttcaatcaagaacaagcgcatctatccactgtttatcaacaattaaccaccactttgacggccatcaatgatacccaatcgcaaaaccagaaaaacggcaacaccatcaaagcgcagatcaccggtgaagccaaactcaatttcgattcatacgctgataatcttgatacattcgctgctttagaaagtatcaacaaggaaatcgatatgctcaacctgaaaaccgattcgctcgttgcacgtcatgatgagaccttacggctgttagagcaaccctactttgcaaaaatcacgctgacttttcctgagggaatagacgccgaagatttttaccttggttcagctagcttcacaaaccaagccggcgatcctgtgatttacgattggcgttcacctatcgccgatgtttattaccagcaaacattcggccccaccagttatcaagctaacggtcgcgccattgcggtcaatctcgaccgacggcgccagttccaaattcaagctgatcagctaatcgatttctttgatacgcagattgccatcgaagatcccttgttattagccactttaaaagaagccaaaacaacgcaaatgagcgccattaccgcgacgattcaaaaggaacaaaacgcgattattcggcaacaaacgactgaccatttactcatcgatgggattgcgggcagtggtaaaacatcggtcatttttcaacgcatcgcctatctactctatcggcaacgcaaagaactcgcattgaacgaagtcctgatgatttcacttaatcgcctatttcaagactatatcgcccaagttttaccagacttaggtgaacaaacaccagtcaacttaaccctacaacaactattggcgcaattgttaccttctgatctagccgcactccccatcgctgatcaaccagctactttgaccatcacacaattaacgttgcaggcgagcgatttccaatctttaagccctggtttaccgctgacgattgatgccgcaacaagctaccaattcttcttaaaaacaccggtggatcccccgcttgataaacgaatacaagcaactcagcaacaactcacaagttgtctacaggaaagcatcacaaatgaagcccaatcagcagatgctttaactcgacttgaaagcctcactgaaaccgagcaacagcgcttattcgaccgcttaattcgcgaagatgaaccactagcaccgctagcacgcaaaatgattcgtcatgattaccaagacttagctgatcagctaagcggttatcaatggcttgcttttgatcaaataattgcccgtcaaacaccgattgatgctgttattgcagctcagatttatgcttatttaacgcatcacgtcttcccaaacgttaagcaggtctttatcgatgaagtgcaggactatcacgcaagcacgttatctctttttaaacaacttttccccaaagcacagttcacggttttcggtgatcagcatcaaagtatcaccccgcataaagtacaattcgaacaattacccaccatttttccacaactacaaactgcggcactgcgcacaagttaccgctcatccggtgcaatcacgacgttatttagtcaactattcaccgatttaacagatgtccatgccgttcaaccagccggcaagcggccaacgacgatttgtgcgactgattttaacgactacctcacccaaatccaagctcagattgaccaactaccaactgaccaaaccttagccatcatcacgcctgctggtgactttgacgagcagttaactggcctcaaaaatgtccaccacttatccacagaaacgacgaatctccccgaaaccggcgccttcactttaccgctgacgctggctaaagggttagaatttgataacgttttgttgtacgatctgactaacaattattataccgagccaactgtcggccgcaaccgcctctataccgccatttcgcgggcaacgcatcaattgacgctcagcgcactgggcaagttgccggttgaattaaatggccaataaattggtcatttgactgactaggctagtcctcaaaatataaacgctcgctgtcgcactctattcaaatacaaactgattgttgtacagttcggcgtagaagcctttttcgtctagtaattcttggtgactgccttcttcgatgatgcgaccgtctttgaggacgataatgcgatccgcattgagaatcgtctttaaacgatgggcaatcacgaaactggttcggccttggatgacgttgtccatcgctttttggatatgactttcagtcaccgtatcgacgttacttgtcgcttcatccaaaattaagagcgctggaccggtgataatcgtccgagcgatactgatcaattgtttctgaccggtactgaagatgttatcttcttcactgacagccgtttgataaccatcatctaacgtcataatgaagtcatgaatgtgggcttgctgggcagctaccaccacttcttcatctgttgcatcgggtttcccgaagacaatgttgtcgcgaatcgttcctgagaaaagcacggattcttgcaacacgatgccgacgtgcgagcgtaatgcatccaaatccatttcacggatatcaatgtcatcaatcttgactgcgccttgatcaacatcatagaaccgattcatcaagttcatgacggttgtcttcccagaaccagttggaccaaccaacgcaatcatttggcccttatccacttcgatattcacatcatgcaaaatttgcttacctggtaaatagctaaagtcgacatgttccatggtcacggagcgttcaatgccctcaaattgcacaccgtcggttggacgcacttcatcgtcttcatcaaacacttcattcactcggcgggcaccggtaattgccaattgaatcatgctgtaactcgatgaaagttgtgcgatctggttatagaattgttgtgaatattgaacgaatgttacaactaaacccaaagcgatcgactttttaatgtcaccgttcaccgctaaccagctaccataggaaatcacaattgcggtattcaccaacgacatcccttgcatcaacggaaagatcatcccagaataaatctgaccttttaaagtcgccttgcggacattttcattatgttcaatgaagccatcaatcgtttcttcttgaaggctgttagtaataatcactttttggcccgtgattttttcgttaatgtagccattgagtttcccgacttcatcttgttgcacattaacgtatttttgcgctttattaatgatgatccaagcaaggatgaatgaaattgggacggaagcaattgtcacccaagcgagctgcacatcttttctaaacatcataatcaataaaccaattaagagcgccgtgcctgatacaagttggctcaacacttgattcatcgcattgtaaatattatctaagtcactcgtaaagcggctgagaatatcgccatctgaatgacggtcgaaatatttaatctgcattttttggagcttattgaataacccaatccgcatccggttggttgataacgcgttgacgcgtgagaaaaccgcgcctgataccaacgtcgctgctgaactaaagacgtagaataaaatcaacgatacaatcacctctacgaaggcgtctttagatgccccactggttggcaaatgttgggcttttaaaatttgaaatttcgttgcatatttgactaactcattgagcgcgtccccgatatattcgggtgctttcacctgaagataagtcgcaatcacagtcatcacgaggatgattgcaaaagaaggtttataccgctttagataatggaaaaagaacttcattgctcggttaaattctcgcattggttatcctcgctttcctttttgcgtttcaaagatttctcgatagacatcactggtttcaagtaattcatgatggttaccaacaccgactaaacgaccttcatctaacactaaaatccgatccgcgttgaccacagatgaaatcttttgcgcgataattagtgttgttgtgccagctaattcacggtctaacgcctctttaactaatttttcagaccgggcatctaaggcactagtactatcatccaaaatcagaatcttcggttgcccgattaccccccgtgaaattgagagccgttgtttttgaccaccagagaagttcgcactgcgttcttcgacggttgcatcatattgatcagcaagcttttcgatgaactctttggcttgggcaatccccgttgcgcggtccatatcggcgtcatccgcatcttttttcccgtgcttcaagttttgtgcgattgtgccggagaataaaatcgctttttggaggacaaatgaaacggcgctgtgtaaattatgttcgtttaaatctttgattggcacgccgccaattttaatctgcccttcagtcggatcgaacaagcgcggaatcaattgcgccatcgttgacttaccggccccagttgcgccgacaatcccaatcatttcaccagcgttaattttgaaattaatatctgttaacgtgttacgatcgtcttctggataacggaagctgacgtgatcgaattccaacgtccccgctaagttttgatcagggacatctggataaacgatatcaggctctgttgaaagaatttcttggagtcgcttcaacgaaactgccccacgagatgccatcatcatcatcatgccgcccatgatgatcgacatcatgatttgcattaagtaattcataaatgaggcaatcgccgcaatcgcttctggatccgtatcgactaagttcccaacgaaatagattgatgcgacaaccgctaagttcgccaccaacatgaacgctggaatcatcacagaaaaaagcatcccgacgattgtcgtatggtgttctaattgattgcttgtttttgagaagcgactgatttcgttatcttcttggacaaaagacttcacaatccgcgtgcccattaaattttctttagcgaggttattaatcttatcgattaaattttggatggcaccgaagtgtttccccatcgaacccattgataagaatgtaatgatgaagaccgcgatcactaagagcacgataatccaccataaactcggaatcgaattcatcgcaaggatgaaactgccgacaaataaaatcgggattctaaaaatcgtttggagcgtcatcataatgacgttttgaacctgggtcatatcattggtcaaacgcacggataaattcccaactgagaatttttcaatattggcaaatgagaaagtctgtatcttccggaaagtagtttcccgcatatcggcagtcattccctgcgccgtcatcgccgacgtaatggtgttgaccacgcccgcaattaaaccaaccacggcaattacaatcaaataaattccaatttgacgtaccttatcttgatcgcctttcataatcccttccaaaacatcttgtaatagttttggttgccatagtgaagacgcaacagaaataaccgtcgctaaaatggaaagactaaacacgccccaataaggctttaagtgctgtttaagtatcgacatgagcatccctctttttctgtagttgaatctcctgtacaaatcctgtacagtataatcgaacagtgttcgagttactactttatcaaattttaaaacgaattacaatcatcttttcataaaaagtgaaggagcttcattaatatggtaaaacagtcaatctctgccgagcaaatcatcactgccgcgtttgaaattttacaagcatccgggaccgtcgatgccctttcaattcgtaaaattgccaatcaattagacatcggggcggccacattttactggcatttcgaaaacaaacaagccctcctacaggcgatggctgataacattattcaacaaattgagattgagccatgtaacacaaccttagaatggacagaccaaattcgccaaatttttagcgccatttacaccacttacatagcacagccctatgccgctgagttgatgatgcggaccgtccctgcaactaaggcccgcctaggtcttatcaaccacttaattcaaatccttttggatgccggtttcacgccagaacaagcaagcctagcgattgaatccatcgatcacttcatgtccggtctcttcactgacatcaccggtgagcttgagatgaaacatcgcgtctcacaacataaagacacttatcttgcacagttaccgcttaaaatgcagcagattgcgactgacaatcattacaatgctttcttaaaaacttttgaacatcatcggcaccaacaacaacgctcactggaaaaattcatgctaggcctcgatattttcctcgctggtttgcaacaacaacttgcttaaataaaaagcgcgcagacaactgattgtctgcgcgctttttacatttaaactgcttttgaacgaatcccgaatccataactcagagccatcacgccaacaatcatgatcatgtataacggtaatcgagtattcgatcccgtatgcaatagactcatgccgtacgttaaggcgctgattgcgaggtagtagccaaaactaaacaacccgctggccgtgccgatcacatcttcgtaacccactaacgctaaattcaagaccaccggtaaggtcgtattcaatccccacaagaaaagaggccgtgggacgacctcttcttttgtgggtttctagctttaacgcgctttttgaaactgacttctgtgcttagctccaatccgtaaacaatcgactacgtcgctcatttacagatttaggctagtgctcgaagtcaaaccgtttcaaacgcgcttctatttctttaacgtgcttttaattcgcaaccttctgcgccttgctacatcaaccagacaatcgcccttggcgcttatccttctgattaggcaagtgctcaaaggctaaccgcgaattaacgcactcatttttttaccagcttgcttttttgacgcctgggatttggcctttatgggctaattcgcgaaagttgatgcggctcataccaaattgccgcatgaaacttcttggtcgaccatcgattgcatcgcggttccgcaatcgcactgggctagaatccttgggtaattgagaaagggctaagtaatcgccctttgcttttaattctgcgcgcaagtcagcgtatttcgctactaatgcgcgttgttttgctaattttgccacttttgatttttttgccattgataaaactcctttttaccgtgctttcaaaaacatcctgttccggttagctacattagccaaacaatcggttacaccgctaatttggctaatcctcacaggataaccacttttgacgcactcattttctttaacgtgcttttaattcgcagacttctgcgcttagcaccgtgaatcaaatcatcgacttcgtcgctaattcgcttccccgtactaatactcaaaagttgattaagcttgaacgcacttttacccgattgaaatagcctacgctaactatttatgaaatgcaattaaaaagacttataaaaagtaaccatttttcaacactggcctgtgctatacttaatctaagttgatttcacagaaaggggcactttcagatggcccaaaaaaacattctccaatacttaattctcgggctgttaaatcagtctcccaaaaccggttatgatttaaaacgcgtctttgaagatgatatcggtgagttctggcaagcccaacacagccaaatctatcctgaactcaagcgactcgaacaggctgatcggatcacccacgtcgaattgatcgccggaacaaaattaaaaaagaagcagtattcaatcactgcagatgggattgccttttttgacgagtggcgatactccccaaccagcgaaattattgccagcaaagacgaatttattttgaagctatactttatcgactcaaaaaatgatgctcatttagacgcaatgttcaccgaacaaaaaaccttacaccaagccaaactggatcacctactcgaccggcgtcaaacccttttcagccaacaagctgcggtggatgcgcactatggtcattatcttattttagaacacgcgattaaccgcgaacaagactatcttaattggttaacaaccgcacggccgtaaaatcgacccttaacaaatttgagataagtgctatcctattagtaagaagtaaatcaagttaggctgtttcttcatttgtatacgttataataacgcgcttgtacaggtggtcagttgaccaattgtatgggcgctttttttgtttgatccagcaacctagactttaacaaattcaggaggaatattattttaaagcgcaagaatgttgataaagtcgtcttcatccccacgatgttactgttcgggattgtctccgcatttttaatgttggggggtgacacgcttcagcagtcgatttcacaactacttgatgtgatgacggcacattctaaatggctttacattggtatttatatcattaattttattttcctattttggttggggtgtagtcactatggccatatccgcctcggccaaccaaatgaaaagccagaatataacgacttccaatgggggagtatggtttttgcaactgggattgacgctagcatcttaatgcttagtaccactgatccactgcaatacttacagaacccaccatttggcgctaaacctttctcggctgaagcataccgctacgccaacgtctgtgggcaatttcactggggacccatggcatggatgatttttgccaccgcgactgtcgcaattggctacgctctctatgttaagaacttacgggtacaacgtttaagcgccgcaatcgacctattagaaggaccacaaccttacaaaaaaataattcgcaaattaatcgactttaccgttgttttcggcattatggggggcatcggctcatcaatcggaatggaaattcccgtgatttcaaaagtcttgagcacaatgaccggtttgaatgataccatctggcttaaacttgccctcttcattatcttactggtgctattcaccctcacggtatatgccggcttagataaaggcattaagaagctcagtgcttggcatatctatactgccattggctttttattactcgtcttactaatcggtccgacattcaagctaattggcgctgaaggccgcgatgtcttccatctctttggtaacttcgggcgtttaagtttaaatcagactggtgcacacagtgcgttcgcacaacacgaaaccctcttttactggggatggtggttatcttacatgcctgtcatgggcttattcatcgctcggatttcacgcggccgaaccattcgccaagttttattgggaatggcgacatacggcgcatttagttgtatgagcttttacgctgtacttggcggttatgcgctcttcttacaacgttccggtcaaatcgatcttgttcatctattgaatacccaaggacaagccgctgtcatcgcggcggtcatcacgaccttaccgttcaaaattatcatgttagcaattttctgtctgtcatgtttcattttcctggcgacaacgatctcttcttcggccttcatcgtctcatcatttaccagtcttgaattgaaaatcggagaacaacctaatcgttggaatcggatggcttgggtgatcattttcattctattttcacttggaattgtacttgtcggtagtttccaaaccattcaagccgtttgcgtgattgctgggttcccattgatttttgtctgcgcattattgctcgtttcgatttttcacgccgttcatgatggcgagattcccattgaaattgaaaaagaagaaacttctcattttctgaaaaaaaagcttacgccgaaattttttatgtgatacggttatatctgttaacttttcagaaagaagaaatttaaaatgccaaccaataaaaaagaaggtattatttttacgacattaatgtgtttttgcatggtacttggaatgagtatctataacttaatcctccacgatagcctctcatggggcgctttattcaccggcttaatcccaggcttcatcgtcgctttcatcctcgatgttttcatcgttggggcaatcgccaaaaaaattgcttttagtttaccacttaataaggacaataaattagtcatgattttgacgatttcatgtttgatgattcttggcatggttacatgtatgtcacttttcggtattcttatcgaaggtggtatccctgcacacttaggtagcgtctaccgtcatacttggttaatgaacgttatcgtcgctttaccattacaattaatcatcgtaggacctttctcacgtacgattcttggtaaaatccaagcaaacgcaaccgcaactgaaacagctgaataaaaacaaaaaaaaacgacgactagcttacgtagctagtcgtcgttttatttatgctaatattttttgaatagccgctaattcttcggccgtaaacgttaaattatctagtgcatgcacactgtcttgtaattgactcaagcgcgaagcaccaactaacacactggctacagtcggctgttgtaaattccacgcaagcgccatttcagccaatgattgcacacgttgttgcgcaattttgttcaattcttgaaccgtactgattgtttgatcaaccttttcaggtgatagggagggactatctggacgagcttgcccgcgaatcggctggaatcccgtttaaataacgattggtcaataatccctgtgccaacggactaaacgtaattgcaccgataccttcatccgccaagacatccgttagtccatcttcaatccatcgatcgagcatgttataacgtggttgatgaataataaagggtgtcccgagcgctctgaaaaccttcgtaatcgctttggtttgttctgccgaataattcgaaatcccaatatatagcgcctttccttgttgcaccaataaatctagggcccgagctgtttcttcaatcggcgtatctggatctggtcggtgatgatagaaaatatcgacgtaatctgactgaagtcgttttagtgactgatcacagctagcgataatattcttcttagagccccactcactatagggaccgggccacatataatagccagccttcgatgaaataatcatttcatcacgatagcgacgcagattatcatgtaaaatccgctcaaagttttcctcggcgctgcccgctggtggcctctaattattcgccaaatcgaaatgagtgatgcccatatcgaacgcgccaaaaatcgtttccttttgagtcgccatcttatcggtttcaccaaagttatgccataaccctaatgaaatcgctggtaatttcaacccagaatgtccgacgcggttatattgcatcccttgataacgggtttctaatgcgtgatacatgtacaacgccttctctactcaagtattttgactatttagccgatcgtcttaattgcgtcttccactaatccccagaacttctgatgatcgagttttacagcgactgatgtgtgacagtctgttggaattgggaatctaaaatcggcgaccgtcatcccacgcgtcaatgttccattgagttcgatatcaacgggcactttcttagtggtcatcacacttggatcaatcacgtaagccacggcacatggatcatgaacgggcggtgcatcgaaattttgccccttcttgtacatatcgcggaaaaaggctaacaaatcaaccacgaactgagacgtttcagtatgaatgccttcaatttgttcaacaatatctggtgtcgctaacgcttgatgcgtcaaatccaaaccaaccattgtgacatcccagccggcattgaatacaatcttggccgcttctggatcaaatttaatgttaaattcggccactgcactcgcattcgcttcgtgataaccgccacccattagaacgacttctttaacgcgttcaacaatcttaggttctttgcgtaccgccattgcgatgttggtcaacgcacctgttggcactaatgtaattgtattagctggatgcgtcataattaaatcaatgattaaatcaactgcatgacttttttcaagcgccaccgttggttctggaagaacaaccccgtcaaggccagtctccccatggatatcagctgctactttaatttcttcaattaatggtcgcgaacacccagcagcaatcggtacatcgtgcatgccgatcatggtcgcaactgcgagggcattgcgcgtcactttcgttaacgtctgattggcagccaccgttgtcactgccaacaaatcgatttctggattgccgtatgctaacatcattgcaacagcatcatcatggcctggatcacaatcaagaattattttctttgccattcgtaaaacctccactctctttcacttcgtgcatactatcactatagaatttaagcggtttcaagtcaaccatatataataaaattcaatcatgaaacggagtctattatgcgcattgatgctggcgaataccctaccggcgaaaacgccgtccaccctaagaaagttaaacgtttaaaattacttagcaaggttgcaacaatcacctgtattacgctgtatgtttcatacatcccccaaattatcgctaatttttcagggtcacctgtctcacctttacagcccttagtcgcaacaattaatgggtgtctatggaccgcctatggctggaataaaacctataaagattggccggttattatttctaacattcctggcgttattttcggactcgttaccgtaataactgtttatattcactaaaattgtttgttaaagccacgatttgcgtcaaataatttttgataactaacagaaaagcaatccatcataagttgcttctctgttatttttttgtccctttacccaaacataaaaagccaaggtgattccttcttttatcgaaagaaaaccatcttggcttcactttgaagtaccgactatgggactagtcggccttaagcttgttattttgctgctcgtttaacgtatgtgccttcttgtgtgttgatttcaaggacttcgtcagcgctgatgaaatcagggacactaacgactaagccagtttccatcgttgcaggtttacctgaaccagtcactgttgcgcctttaatcgaaggttgtgtttcaacgacccgtaagttaacagtagttggtaaagtaaccccgatcacttctgaaccgaagaattgaatcttgcagttcatgttttctaataagtattttaattcagcttcaatagcagctgtttgaatttcatattgttcgtaagtttcaagatccatgaagaatgccacgttatcttgtgtgtataagtattgaacatcttttgtatcaatcattgcttgttcaactttaacttctgggcgcattgttgtttcaacaattgagccagtccgtaagtcacgcaacttaacacgcataaccgtgtttcccttacccggtttatgatggttagcttctaaaactttgattaacttgccgtcttgttcaaacgtcattcctgctctgaggtttactgcttcaatcatgacttgatctcctttatttaaaaaaatattcatctctaactgtaccaaatgaaagccgtttaatccagccctcctgtggtagttatcctatttaatgtcgagtttatgaatcttatccgctggttgtggctcataatgttggtacatcttcgtaatggccaccttaggtaagcctgattcactaatataaatattaggtttgaggtatttcttattttgcacatcctttaagtgataatgttgaatcacttgtttctgatggccagtcggcgcttcatcttgaccatagaattgaatcttggctaatggtaagctaatcgttgcattattaatcttgaaataagcaacatctcgattgctgccaagatacgtcatcttttgttgcttatcagcttgatagaattgctcgatttgcttcatgctgtgattatcgaccagccggacaatcggttgatcacctttgaaaaggtgtaagccatctagcgactggcgcacgttttgagcactcaacatcaaccagacaatcaccaacatactgataaagtacacaatatgtaagctaagactgctagcagcatgattcaaactaaaagtgtagctatcctctagctctttattcatgatttggcgccgaatgcgcattgcaataatcttatacgataggtaccacactacaagcgcgactaaggttgccccaaaagctgtcaaaattgtattttttagaatttctgaatccgtcaataatggactaaagccgctcacaagtttaattgtgagcgcgccaaggattagaatcacaaccatttgtagtacaaaaaaacgggtccgaatacttttgctaatcttcgtgggtgttaccactttcgtcttatctcccataccataaatcctcccttgttaacctacttaccattttagcataccgtttccatcaagttgattaaaagtccctcgttggcttattttttacaaaggcatctttcttcaaaggtagctgttcaatatgataaggtgtagttaatcaaacggaggtgtcgatatgttatatccagaaagtttaactcaattactcgccgattcaaatcagccagtcatctcgttattcattaacttagagactggcggacaagccattaatgcgaacaagattaagctcaatagtttttctaagcaaatccgtgaacagttaaccaccgactatcctgaagaaaaagccttactcaaccaacttgaggacttactaagtaccgctccccaagaattagcacatatacagtcagttgcgttttacatcacagctgctggtcactacagccaaccccttcattatccgatcacgactgaatattttctaattgctgatcaacccgacctgcgtccactcagttcggaattaagtctgagtctgaacgggaccattctctgtctcaacaagactacttttagtttgaaatccattcaacaaaatgtcattcgggattatcctttacctaaagacgccccaacaaccattgaaattgggattggcacagagcgtaaaggcgaagtcgtccaaggcttctcaagtccaacccacagttttgttgtaaaagaaaatgaacaacttatcgatcaaactaactatttccgcgtgattggccgctatcttgatgacttgctgcctgaaaaagcaccgatttacgtggtcacattacccggcaacttaaatctcttcaaggaactcgtcgttaatccaaactaccggatggatcaagccatccaaacttcccctgattctctttcagatgacgacttactcgacaagttactcacaaatgcgcgtcatgaactccgacaaaaagcgctcggattagcagaacgggccgctagtgcgtatcacggcgattcaaaccttggtgatcctgagattattctttcacgcattaacaatcgccaactaacagcactcattatcccaactgcacttgcaccatcagcaacaatcagcgccgatcaaatcatggatcttaatcacatgatgattgcggccatccaaaccggcctgccattctacccagtaccagttgaaaatattccgacaggactggtggcggtgggaatttaactcttaaaacacgtgccaatacagcaacgtatattcaagcgttgttgtactggtccgtgttttttgagttgcaaatacttgatctagataagctgccagttggtccgttggtaattcttcgtaataggcctccaaaaatagcctgtcgaaaacttcacttgtttgatattgaaaaatttgttgactaacttggtagcccgcatcttttaacacgttttccacagccgggatgatttccggtgtagtgttgggatcttgctgttcaatcccaaaataacgttcaagcggtgtgaacaagtcgtcctcgtttttagtgagccgtaagaatgcacaccactgacggctcttttcggtaatcgtcagtaatgcttgattggcttcgattgccggatttaacgccatccaaattaaatcatagcttttttgtggcgtttgcgccataaaatcagccacagactgctgtagataagcaatctgttgttctggtacatgctgtttagcttcttgttgtgcatactggagcatttgcgccgagatgtcgataatcgtataagcctgactgttttgcactagaggtggcaaataacggccgctaccaccacctaagtcagccactgtctcaacaggcagtaatcgccgatcctgtaaaaaagccacaacgtcagtgacaatcgacacctgtgactcttgttgaatctgatagtattccgctgcaaaatcatcccaaaaagctgcgacttcattatccacaatctatcctccgcttaaacttttattttctcagcttagcatataaaaaagatgccgacaaaataaattatcgacatctttttgaaacgtgctttttggttgcaccaacctccgcttaatctaaaatactcagttgctatccgcaaccgaacacacgcttttttaaacgtgctacaatcgccatattcttccgttgttaggctaatcctcagaatatctccggcgattttcgcactctttatctcactaccagcactgggattggtgcgtattttgccatgtaggcggcttggctgccgaagtatttagcaacgcccttttgtgatttcgaaccgacaattaacaaatcgggtttaaccttaggaatcacatcttcgataatcgcttcgcctggttcgccttctgcaattactgttcgcacatgattcacaccgcgcacataggcttgatcttgatattctcgtaggtggttttcaagatcctcatattggccgtggataaaatccttgttcaatgcttgatagacgttcatttcgtcattttccaataccgatacaatgactaattctaaatcctcgcgtttagcccgctcaattgcataatcaaacgctaataacgcatcctctgagtcatcgaccccgactaaaattcgtttaatttctaaaactgacatgtgaccaacctccaattaattttcagttgctaattgctgttcaaaccgcttattgcctttatacaattcaataatcatccaaaccaataatgccatcacaccagcaatcaacacatatgcaatgcgatcagcagtagccaattgtgcagcacttgcgtgatcaccatagaaagcttcgatttgtcctggcaaccccatcatattcaaataggtcaagccaatgaccgataaccaacctaagcttttaatcaaccaactattcttgaagcgatcccccatctcaacccggctgtcggtaaacatcaacagtggcagcattgaaaatggtaaggcaaacgctaagaaaacttgggaattattcatcaaggtattgagcgcctcatgctcttccaaggctggtttattgctggtcatcatgacgcagattaataccggaatcaccgataacaagcgggttaccaaacgccgcaaccacaatggcattctcaagtgaatgaacccttccatgatgacttggccagttaacgtcccggtaatcgttgaattttgcccagaagcgagcaatgcaacggcaaacaaagttgataagattccggtccgggcaacacttgcaagaattccgttactcattgttgaggtatctgacaaagcttcaaataacccgaagaatgatggatctttaaccgttcccgttttaaaaactgcaacccccatgattaataacaacgcattaacgaaaaatgccatcgtgagttgaatgtttgaatcccaagtggcaaagcgcactgtttgtgcaacctgtgcttcgttcttgcgatcaatcttccgtgtttgcgaaatcgcagagtgtaaatatagattatgtggcataacagttgccccgataatccctaacgcaccagtcaatggggttagtccaccaacagctggcccggtggcaaaggtcttagcagttggtactagcccaacaatcacccctgcccaatcaggatctgagagtgctacttcataagcaaaaaccacaaaaatcacgacaattaatgcgacaacgattgcttcaatcttacgaaaaccaattttcgttaagagtaataatagcatgacatctaaaatcgtaatgaatactgcaatcagcagtggaatcttaaataataagtacaaagcaattgccgccccaataacttcggcaatatcggttgccataatcgctaattctgtcaaaatccacaagacaatgcccaacggtttactcgtccgtgcgcgaattgcctgtgctaagtccatctgagttacaatgcctagtttagccgccatatattgtaataacatcgcgattaaactagacaccaaaatcacggacattaacaggtattgaaaactctgaccaccagtaatcgatgttgaccaattccctggatccatataacccactgccaccaatgcacccggtcctgaatacgctagtaacatcttccaaaagcctttgccctctggtacttcgaccgtcccattaatttcttcaagtgatgggccgttcgcatattcaatcagcttgtgcttcttgcccttttcttgttgattcattatcctcactccttattttgatcttgataacagttttattgtacgccgttttaatgaaatgtaaataaaaagttaggcaatgctaatttattttattcaaatcgataacaaatttattaatacaagctacaaaaaaagcgccgtcgaaattattctcgacggcgctttacatactgctttaatcatccgtttctttttcaattagcgcgccagtttcagcgtctaatttaacttgcattttttgctgtttttgatgaccttctacttcccagactgttcggccatcatctttttccaatgaccatttgatcacgttcccggtgaagtattgttgcgctttttgaagagcttgttgaggcgtcaacaattggtcaaacgctaattgcttttggtgtcgctcgacgccattttgttcatcggcatcaagggcttctttcgacaatcgactggttgcgccagttcgagcatccacatgcatgtgaagctcttcattgtcgttcattcccgttaattcataaaacatttggttaccccattgcttcagctcaacctcggttaaatctgatgcaggatattgttttgcgtacaattcacgggctttttcaagcgtcactttcggagcttgaaccgtttgttgcggactagtcgattctttttgagcggggggtgctgaatgttttgtttggttggctgtacaacccgtcaataggccgagcattactaaactaacaatgattgttgttttgcgcatcctgttctccctcgctttgttttgatacttaaggataccattcaacagggtaaattaaaaagcaatatcccttcctagagcaatgttgtccccactttgaccaataaaccaagcccatacacgatgatgatgatggcactcactaagttgacgcccatcaagaattttggtgaaacttttttccggaaaaggctaaagataatggcgataccaaagaaccaggtcgcggttgccgaaacaacccccacgatgaatggaatcgcctcgctactcgtcataccaccccgcaatgcgcccagcattaatgtcccatcaatcaaggcttgcggattaccccaaaccgccacaaatgcagtcaaaataaccttccccagtggcattggttctaacgcgccaaacgtaacggtactgcgggcacttttcaaaatggtgtatccaatccataaaatcaaaagtccaccgattcccataatggctaaccgaaccgcatcgttttgcacaatcagtgcgccaatcccataaaacgccacgagtgaaaagagcgcatcaaataaccagatgaacaaactgttgaaaactgcccgccgtgttgtattcgacatggcattattaaaaacgaaaatattttgcatcccgattggtgcgacaaacgcaaatcccatcaagattccttttaaaaagaacatctattaacctccttggcaagttaccttttagcgtaacatatctaggctaaactttcttgtctggatttaattgtaaaattagcatcgtcatcaacaagaataatgctgataaaatcaacgtccgttctcctaagaatgaaacacatagtccgaccatcactgcaccaatcgtaaaactgataatgatgcgtaaaatttgccagcccttatcggctgccttacgatcatgtttaaaaacagcgtcataaaaactttccgccatcgtccgtacatttccagtcatcatcaatgatgtaaatgggccaccatccaattcacgaaattcctgtaattgcgcagccgcaatgattgaaacaagtgaacttgcaacaatatccggtacatacggtgaaattcccgcaacaatcgttaagaccaagacttcaatccccaagataatccgttgtcgtttgttaatcgattcgtctttttcaaaccgatgttgtaaaatgcgcgttaagattgttcccaacataaaggcgagaatcggggtaatgtgccgtaataatacggaccatttcatctgccccaaatgggttcctaataaaattagattccccgtttgtaatccggcgaagacttccccgtgcaccaaataagtgtaagaatcaaagccccccgcagctgccagtagcccgccatataataatttgtcgctcattgtcattttgttccgcattaattcatcctactcctcaactaaactataagtattaactctatcggaaaaaccactcgccgtctacaagtagttatcatttaaaacgttatcaaaaaaaggcctcagcaaactgattttgctaaggcctttttggcttaattttctacgtcaccattgaaaccggctaattgacttgaataaattgataaacgcgtcgcataactaggatggtcattattttccttgaccacttctttaagcgtcggcaaattacaagtttaatccgaacaagcccggaatctttcaatggcagtctgttgatgatgtatttttaatggtcgttgattaattagttcaagtgctgataggatctcatcagtcattacttggctaaaattggtctttttcgggaagaaccagcgtaaccgtctattaaaatattcattggagccttttgggttgtaaaagtccgattgaatatcgaatttttacaacccagaaagctgcttaaagtttcgtccaatatttggggttcacttcaggcacctctttttatttatcttaaaagttaaacgtccggctccattcatgtgtgccacgatattggaatggttggcttttaaaacccgccatcccaaaactaacggtcattaaaataattcccacaagaatcatacataaactaatcttcaaccaatttttcaacatctacgccaccacctttaatcgactacggaacatcccaactagccagcgtgtgattccaaccgagaaacgaattaagtatttcgtcatgtaccaggtcgcccctgcacaaatcagccccacaccaaccatcacaaaactaattccaagctgcatcaccgcaattatccagccttcttgtaagccaacaaagaacgataaaactaagctgacactcccaccaagaatgccggcagcagcaaagattgcccccagaaacgggcctaaccaaatcaagaaataaccaagtgccactaatatgatggcggtcaataacaacgtgccccataacggtgaccctaaaactaacaagatactgattaaaataatcaacatcggtgccatcttcttttggcgaaccggtttatctggtgtagctaattgcgctacaatctgagctggcgttgctaaactcgcgataatctccgcttccgtttcacccgcttccagtcgatcatcgattaattcatcgtaataatcaatcgtgttggctgcatcactaatcccataccgcgttaattctgccgcaagctgtttaataaattgattcttagtcattgttacactcccttatgtaagtataaatgcccatcactgccggccaatcggccaaaaaactatcaatcgatgcttgtcccgccaatgttaaatggaaatatttacgcaagcgtccattatgttcgacccgataactttcaatttcaccctgcgcctcgagccgtttcaagattgggtataatgttgagtccgaaatttcaacgacactcgatgtatctttgataatttggtagccatatgaatcctctttcttaagcgttgctaacacacaaaattccaagaggcctttctttaattgtggattcaaaccgatcaccctttcgaaagttaatactatattatgcatagtattgtgtcaagcataaaaaaagaacgcccatcagttttacctgatgaccgttcttttgaaacgtttgataacagtcatatcccgactgttatcaaacccttaatctctgccgccgccaaaaatttggagcattgtgaggaataagttaacaaagtctaagtacaaggttaatgcgcctataacagctaaaccagaaaccgaaatttcaccagttgcgccgtattgacggtacatcatacttaacttttgattgtcccatgctgttaaaatgataaaaataattaacatagcgtatgacaagaagtagctaattgcagctgatgccatgaagaagttaaccaatgagacaataatcacaccgattaaccccatcattgcaaacttgccaaagccgcttaagttattctttgtcatgcgaccataaatcgacatggcaatgaacactaaagcacttgatgcgaaagctgccccaatttcaccaatgttatacaccagtaaaacggccgtaaacgtcaatccgttcaacgccgcatatgccacaaacatggctaacgaggccgttggattcttcattgaacgccgactaatctgaacgactaaaattaattctgcaatcatcaagccccaaaccatccacgagctaccacttgataggattgtgtaagtttgtgctttaaacacagtcaccattaaaacagcaatcagtgctgaaattccgacaccgacagccatcaaaccatacactttactgaaaaagcgggcttcgctgtcgacattcacaacgcgtctttcttccatgaatattcacctcttatatttctaaacgggcccataatcacccgattaggaatattgtaacaaatccatccagaaagacaatcaaaatgcctaaatcttaattatctttaggacttaaattactcaataattcttcgtaagcatattcgtatttttgcacatcaccagcgcccatgaagacaacgactggttggtcgaagtctaagagcggtgacatattgtctaatttcaagacgcggccacctttagtgattttcgcacctaagtcagcacttgaaaccttccctgctttttcacgcactgaactaaagatatccgttaagaagacttcatccgcaaggtttaagctagcggcaaaatcatccattaacgcaattgtccgtgtgaacgtatggggttggaaaaccgctacaatttgtttgtctggatatttttgccgtgctgcatccaatgtggctttaatttctgatggatggtgcgcataatcatcaatgattgtcacgtcagcaactttcttttctgtaaagcggcgtttaacacccttgaagtctgccaattcgcgtgccacttctttgccatcaattttttctaaatgactgacagcaattacggctaaactgtttaagacattgtgttcaccgtaaagtgggacgtggtaatggccgatgttttcgccatgatagtaagcatcgaattctgaaccttgcaccgtccgttggatgttgcgggcttggaagtcatcgtcttcgcgtgtcccataataataaacgggcacattagctttgattttccgtaattcaggatcatcaccccaagcaaaaatccctttttgaactttgtaagcttctgattggaacgcgtcaaacacatcatctaagcctgtgtaataatcagggtgatcaaagtcgatattcgtcatgattaaataatctggtgaataagctaggaaatgacggcgatattcatccgcttcaaatgcgaagaattgcgcatctttaatccctttacctgtcccgtcaccgactaagtaactcgtcttagccacaccacttaaaacgtgagctaataagccactcgtacttgttttaccatgcgcaccggccacgccgatacttgtatagcctttcaataattcacctaagaattggtgataacgaacgactggcaagcccatttcaagggccgttttaatttcaatttggtcatcttggaaagcattcccggcaatcaccgttaagccttcgtgtaaattagtttctgagaatggcagaattttgattcctgctcgttctaaatcgcgttgtgtaaacgtatattgatcgatatctgagccttgtacttgatagcctaggtcgtttaaaacaagtgcaagagcactcattcctgaacctttaatcccaacaaaatggtaaactgtgtcatttgttatcatcttttaaacgtcctcttttcaataaatcacaattatctatatgattaaactaatcccttatagtttaccataatgcgggtttgagctaaataatgaatgtttatttttctctgttatcaattgattgatctctaaaacgcaaaaaaagcagccacaaaaattaattttgtggctgcacttaaacggattctataggtcacactctagcctaatgctaaataatcttcgacattttggaagtagactttataccatgttaagaaggtaaagatggtccagatcttccgacggccgttaatgcgttgttctttattggcatctaacaaggccaataacttatcttgatcaaagaattctgcaacgaaatcttcgctaaagagtgctttgactttttcataatacttgtcatcttctaaccattgcttaattggcactgggaaacctaacttaggacggttggcccaagctgttggcaaatgtttagcagaagcttgacgataagcgtatttcgtatcatgactattaattaagtatttagttgggacttcaccagcggccttagccaccttaggatccaggaacggcacgcgtaattctaagctgtgcgccattgaaatcttatcagccttttgcaaaatatcgtttaacatgaagtgatgtaagtcgatatattgcatttgtgagactggatcagcatccgcaacgttatcaaaatcagcttgatagtttgcttgaatcgttccatcattttgataagcaggtttcaagaaagtattggcttcatctgccccaaaaatacttggattttcgatatcaaaaatcacagattgacccgtatagaattcacgcgggttcgccaaattcgtgtataaatggacgcgacctgggaaggctggcatcttcttaacggctttggctaaactggcacgcgcacccttaggtaatttcttcaagccagaagtgaaggccttaattgttgaattgtgggaatgcatgccgtagttgacatagccagcgaataattcgtcggccccttcaccagacaaggcaaccgttactttttcacgggcaaagcgtgacaagaaccataatggcacacatgatgggttcccatctggttcgtccaagtaatattggattttgtcaaattcagcaaacgcatcatcggcattcactttggtttcattgaagttcaagcctaattcatcggcaagcgcccgggctgctgtgacttcattataggtttgatcatcaaacccaacactgaagacttcttgcggttgcaaaatacttgtgacataactactgtcgaccccttctgataagaaagctccaactggtacgtcagccacattatgggctttaacggattcttcgactgcagcatcaatcttagccacttcttcttcgaaagataagtttgaaggattaaatgacatatcccaatatttttcgatgtccaattggccatcttgataagtgaaataatggcctgctgggaatctgaaaacacccttgaagaacgtttcttgtaaatcattgtattgattcatcatgaatgattttaaggctgtcttatttagttctggtttaaattctggatggcgcatgaaagttttaatttcactactgaacatgaaagtcccatctgctaaagtcgtgtaataaaggggcttaatgccgaagaaatcacgagcaccaaataattgcttagtttgtaagtcatagatgacaaagacaaacatcccacgcaattttgtaacaacctctttaccccattcttcgtaagcatgcaaaatggtttcagtatctgaatctgttttaaagtcgtgaccaagtgcgatcaattcagtccgcatttcacgataattataaatttcaccattgaaaaagactagcttagtgtggtcttcattataaatgggttgatcaccctttgctaaatcaatgattgataaacgccgaaagcctaatgcgactttatcatcgataaaatcaccatcaccacttggtccacggtgtttaatgacgtccatttgttggttcaatacttcttttttctttggtaaatcaaataatccaccagcaaatccgacaatcccacacatatgtttaacccctcttttgtgttttactgcttaattgactgcaaaatgaaataacaattaaagggtttgtctttaaccaattaattgctatctattatcatactattttaattttaataatcccataacaaaatcgtaagatggattattttagtaaggctgcgactgcatctgctgtcacttcacggccgacttcccaatcatctggtaagaccataatccctttagcaggagcaccagcaacaccgatttcacgggctgcacagatcatgccgtcactttgaacaccgcggagttgaccaggccagataattttaccttctggcatgacagcacccactgttgccacaattactttttgtccttgtgcgatattggcagcaccacaaacgatttgaacggtttgatcaggtgcaatctgtgtttgagtaacgtgcatatggtctgaatcaggatgcacatcacattcttggacataaccaacgacaatgtgtggtgtttcatcagccactaaatcaccggtgaaaccagctgctacaagtgcttcatttaaaacagcaacttgctgttcagttagtgtttgaacaccgttgaattgtaaatcgggcaataactcattcaccgctaagaaattatagccgatggtttgacctgcctgatcactaatccgtacgattgattgtttttcagttgtcacttgcttttcaacatcaggttgggtcattaccactaagatgttgggaaaagccgcttggttcatacttgcaattaacatttaatgactccttcaaggttagttcaatgagtgaataaatccagtaatttcgcgttttgttttccgatctttattgacaaaacggccgatttctttaccgttatcaatcacaacaaagctaggaatcccaaagatttcccattcttcacaaatatcgataaattggtcccgatcgatttcaataaagtcgtattccgggaattcagcttcaatttctggcatggctggtttaataaaccgacaatcactacaccaagttgctgtaaaaaataaaacatgtttcccttcagtaatcagatgagtcagattcgtatctgtcatcgctgctaattctttcattatgcaccccttcaattttactactcgttttaatataagcggtttgtccgtaaatgtccactccttaggaccaaaaattatgctatactatttaaagacaaaaacgactgaggagtttttctttgaaaaaaaatgggcaaacgtttaaatatttattaaccggcatcggttttgcgctggcggcggctgccagtgcgaagcaatatcgggcgcaacaaagaatgattaaattaaaccaaattttagaagatgttaaagccggcttaaaccatgaaggccagattgtgggttcttggattgaagaaagtccccacttattctcacaaaacaaacggacctttccagtctatcaaggtggcatcatctgcgagcgtgaagatggtacaaaccaatttcgattcaaggtagacgcaagaaccggcgtcgtgattgaattctcacaaatttagagtgcacagcgcggtgggcacgttctgaggattagcttagtcagacgagtgaccaatttattggtcgcttgactgacgttgctaaccgcaggaacataccgcgcggagcacgtttcaaccaatattataattaaaaaggtacgctatcctagataaaatctggataacgtacctttttgagttgaaacgtgctttatcacactgtcttctccggttagctacagaaaggaatcgatggtaaagaacccccatcaatccctttcttaggctaatcctcaaaggcaacccgtgcgataaaaacactcttgctgaaacgtgctattgacgctagatttctgcgcctaactacacctgtcaaattagcgattatatcactcattcgccagcctatgttagtgctcaaaatctgaccgagcgtcaagtgcactcttatctaaaacgtgctttcaaagctagcaccctgtgcatagctacgtccggcaaacaaccaattgcattggttattcaccagactaggctattgctcgggtgctgaccagctttgaaagcactctacttgtagtgtgcctctaatctgtaaatcacttggccgcgcttgctgaatttttcttcgtattccgtttggatgttgtcttctgcaagttcactattgtgtaaatcgagtgagatgtcgtcaaaaaccatcccataatcattcaggctcatcaatgagtattcgaatagaccttggttatcagtcttgaaacgtaagtagcccgttggttgcataatttgttggtattccgctaagaatgacttatatgtcaatcggcgcttttcatggcgcgtcttaggccatggatcagagaagtttaagtacacccctgccacttcgttttcagcaaagaaagttgttaaggctgcgccgttacccaataataattggagatttggcaatttcaattcaacttgtttttgtaaaatgacggcaatcgctgattcttggatttcaactgcgataaagttccggtctggatatttttgtgccatctgagtgataaattggcccttacctgaacccacttcgatgtaaatgggttgttctttggcaaaacgtgtttgccacttgccggcgatatcttccggactcactaaaatcatgctggggttggccgcaattaagtccgccgcccaaggtttatttcttaaacgcattatgttctccttgttgatgccaatcaaaaaggttggacacttgcccaacctttggcatttaatttttattaattatttcagaaatcactgcttctaagcgcaatatgtcacggttcatttcagtaaaacgaccacgttgataatggtgcttaatactttggagtaggttcaaactgccgtaccagttgacgcgcatcattaattcaggcgtcacctctaggccgtagttctcaagccactcgtgccattcttgacgtggaacatattgaaataaaatcattccgaaatcgactgcagggtcggctaacattgccgagtcccaatccactaagtagagtcgattaatatccgataacaaccaattcttatggcttaaatcgccatggcacacctctgcagaaggtgcttgtaattgacgtaacgtttgcttcaaataatcagctgtttgttctaaaaatgggtgttgccgtaaatcttgcggtaagtcgtaaaaataggcttgcaacatttcgtttgctgaccagacacgaccgccaactttttgtaacattcgtttcaatagttgggattgatgcacccgtgctaataacttagcgacttgtgggctattcatctcatcacgtttcaaggttcggccgttgagccactcttgtgcggttaagacatccccactcgaaatccgcttcgtccagattaagcgtggtgttatgccttctgccgagagcgccgctaaaaatggtgatgtgttgcgctttaggaaaatcttttctgacgcgcgaacgcctaaaaatgcagcgcccgtatcaccaccggccggacgaacttgccagccagtatccaggtcaaaattcatcagcctcgactcctcttcaataaaataaagcgccaaaatacagcgctcacgttgcttcaactgtctaataactaagggtatcatataataattagccagtagtcgtcaagtaggaaagcatgcgtgtcacagggactatgcccccaaccgtttaggcaaatagaattgaacaaagccaatcacgagcacgaacaatgctaaaacacttaaaccaacttgaatcgtcatccctagtgtcactaataaaatgacactaaagagtaacgcctgaagcaataataaagtccgcattaattggctgaatgcttgaattcgtttggtcgttgatactgggtatagatgagtgaaaataatttgatcatactgattgtaaaacggtaataattgaaaaccaactagataaatcaatagaagtccgagtgccaaactcaaccaccatatgtgactgaagcacagaatgatgccccctaaaacaactaaccggatatataacccgctgaattctgtgccccgcaaaaagccacgcgcatataaatagaggtaagtattggctggtttagctgtaattggctttaataagccatctaaatagcgacgacgcttaacctgactactgagccctggcacatccgtgaagaggttatagaggcggtaaattcgtcccattcgagaatcttctgcaccaactgccgctaaccaatcgaatagctgtgtcttttgaacacgcgccaattgttgtcgctgataataggctagtccaagcgctacaagcactccgactaaatttagccactgatataattgactggcaattattgccaaatcaaggattaacgaaagcccttttgttgcctgggtttcatccgcttggtaccactgacgcaactggattgaaaagcggcggtctttgatgattaccaatgtaatcaagacaacggctatgtgccatgccgggaccgtcttagtaattaacaagagtggcgccactagaagcgtcacaaaagccattgcaattaatggtaaccagctactatataaacgtgctgatttcaaatacgtcacaaggccactttcttttggcaataagaagacactatccgcttcttttaataatgttgctaagcggccaaaactaactgccgcaagtaatactaaactcaatacaggttttagccaccaagcttgtggatccagtcctttgacggcgttagcatatgtgtagcccaacgctcctaataaaaagataatcgcaatcacgaaatgatcattgaaaacgaggcgcaaatacttcacttgttcttgaatatgtttttgcacgcgtttttgccataatgcttgcatggttaaccttctttcgtcatctgcagataaatatcgtcgagatcggcgtcagccatgttaaattcaatctttaattcttcaagcgtgccagtcgttcgtacgcgaccctgatttaaaagcacaaatgaatcagcatattgttgcgccgttgcgagaatatgggtcgacattagaattgcagctccttgtgcttttttttcagcaatgatttctaataaatcatgaattgccaatggatccaatccagtaaaaggttcatcgatgataaacaagtcagcattcgtcataaatgcattgacgatcattactttttgccgcatcccttttgaaaagtgaaccgggaaccagtctaacttattgtctaatcggaatcgttttaacaatgcattggctttaacccacgtctcttcaacgtttaaatcataagccatcattgttaattctaaatgctcctttaaagtcaattcagggtataagacaggcgtttctggtacataggctactttttggcggtattggtcaggattcgactgtaacgtcacaccgtctaaagtaattgtgcctttttgtggtgtcaataatccaatgatgtgtttaatagttgttgatttgccggccccatttaaaccgattaaaccaaccacttgattgtttggcacagtaaagctgacctcttttaaaacggggacgtgcgcgtagccccccgttaattggttaatctctaaactcataatcaatagcctcgttttttggtttttaaaactacttttttagtgaatcctttttcatatcatatcttaacacgaagtaaactgcgagtgtatgcccccactcaatatttttccatccgcttacaaagctgatggcagtagcgaaaagcccttgtttatgatagcattaagctgtattgagacttcaaataagagaaagtaggcataattaatggatgattgtatcttttgcaaaatcgttcgaaatgaaattccgaacacagtggtctatgaagacgacgatgtcaaagccttcttggacatcacacaagtgacacccggccataccttgttggtacccaaaaaacacgtggcggacatctttgaatacgatgctgatttagctgcggccgttttcagtcgcattccaaagattgctaaggctattaaagctagcaatccagccatccaaggaatgaacatctgcaataataacggtgcggtggcttatcaatccgtttttcattctcatattcatcttattccacgttacacagcggatgattcatttgcaatgcaattcggtgataatagcgctgattacactgctgaccaactacaagcgatcgcagatggtattcacgcacaattggaggactaatcatgtcattttcaaaaggattactagttggtggcttattagggacggcttatgcccttctcaccgcttctacaaccggccccaaacgacaacaagcgattgcccgctatttaaacgagctctcagaaagttcaactgatgttcaacaaagtgctgttcaattgcaaacagcttcgcaaaatttatcaaacgaactcaaaacaactgcagttacatcacttggtggtatcagtgatgcattgcaaacattttcatttgaagcagcaccacgaattgctcaaatcgaagaatcagttgatcgtttgacacaaaacttaaaaaaataaattcaccaaaaattagattgtatgcaagcgataaggttaagcatatcaacgattcccgcgtttttagcgtaaaacctaaatttgaaagttctgtgaagttttagacgcttcgttcaatttagttagtttatgtgttatattaattggtgaattcactacgaatttattcataaatactttgataaggatgtgtcatacaatgaagaaatggctattagccgctgccagtttattaatggtagtttcactagcaggttgtggtagcaagactatcgcaagcctaaagggtggtaaaatcactcaagacgaatactataaagaaatcaaggaaacatctgccggcaagcaacaattgcaacaaatgatcttgcaaaaagcgcttgaaaaccaatacggctcaaaagccatcgataaaaaagttaagaaaacttatgatggttacaaaaaacaatacggttcatcattcaactctgtgcttgcacaaagcagtatgacacctacatcatttaagaacagcatcaaaacacaatacttaacacaagcagcactaaaagataacaaaaaagtaaccaatgctgacttgaagaaacaatggaaatcatacgaaccaaaagtccaagttcaacatatcttagttgaaaagaaagaaacagctcaagaagtcattgatgcacttgcaaaagacaactcaacaaagaacttcaacgaattagctaagaaatattcaactgatactggtacgaagaaagatggcggtaaattacctgtcttcgatagtactgatacatcacttgactcaacattcaagactgctgctttcaaattaaagacaaacgaatatacaacaacccctgttaagacaacttatggttaccacgttatccggatgatcaagaaccctggtaaaggtaagatggctgatcacaagaaagaattaacagacatcgtttacgcttcatggcttaaagaccaaacagtgatgaacaaagtcatcactaaggtacttaagaacgctaacgtatctatcaaggacaaagatttatcagacatcctttcaagctacggcgttaacagcaaagcttcaaaatcatcatctaaataagcattaacaaaaagaaccccgctgctgtcgcagcggggttctttttgtacatttattctgttggttgatctaaattaggatcttcgactgggcgatagaaacgccgcccatccattgcgaagagccgttcagtaaactgacctgcttccgcatgttgtaatgactgggtcatcatcgtgatacttgcatctaattcatcaatttgatgcagaacttctgcttcaagaacttgtggccggacaggtgaaccatattccattaaaccatgatgggccaagataacatgccgcaatagcaacatatcctcagcattcacgtcgatctttaatgtatcacaagcccgcactatctcttcatcaaccagtacaatatgaccgatcaaattgccacgaaccgtgtattccgttgaaataggaccggacaattctagcgttttacctaaatcatgcaagataacaccagcatatagcaatgcctcatcaatttgtggatattgggcagcaatcgtcttagctaagcgcaacattgaaagtgtatgataggccaagccgccactaaacgcgtggtggttggtcttagccgctggaaaactgaagaattccgcttgatgtttttgcattaaatgtcgaaccaaacgttgccaatttgggtttgtaatttcgaataacatcgcgccaaattcgtcttgcatctcggttacttgcaccggtgctttaggaataaactggtcaactgtttgcggttcgtcccccgtcgttaagcgcagtttataaatcttaacttgcggattattttggtataattcccgcttaccttgtaaatggatcacctgacccgccgtaaatttagcaacgtcttcatcagaagcatcccagtatttaccgccgatttgtcccgattgatcttggaacgtaaacgcgatgaattgcttgccgtttttagcaatccgcacgtctgccgttttaattagtacaaataaatccagattctcgtcgttttggtaatcaaataatttctttgctgtcatgtgtcagccccacttcctctagatttaaccaatgatccgcttcaaagtgtgcttgcgtccgcggattggccgttaaataaatcacttggttggccgcactgagtcgttggagtaatgtccaaacggcgatttggcgttgatcatcaaagttgacgaatccatcatccaccaataaaggtaatgagactacgtcagctacctcttctgcaaacgcaaagcgtagcgcaatgtataactgctctgcagtcccctgtgataattcaccgacttcaaaaagcacttgatccgcccgtaaaaccgtcatcagtgggtcatcgaagttaatcttaatataccgattctgggttagaattgcaaaatactgcgttgccttttccaataaacgggggaaccgttcttgtgaagcggccttcagcgtcgcttgaatccaatcaattgctaactgcttagcaagccactcttgggctaaatcagtaatcttagcctgttcttgtaattgtcgctgtcgctgttgttgataactgtcattatcgacaagttgcgcttgcgtcacgcgtagttgcgcaacagcttgttgctgttcttgtaactgacttgtcaaacttgccacttgttctgtaatttgagcggcttgttgcttaagctgttcttgactagcgattgcttgtaaagccgacaagtccgttgccaattcgcgttttaaatcagcttgacgttgttcattagcacggcgctgttgttcattagcaacacaactggctaattctgcggcggttgttaagttagcctttgctaacaatgctgtttgtgcagcgtcttgttctttaatcgtgtctgttaagcgtgtcacttgttgttgataataccggtaactctcgttgctttgtgcaaggtcttgtgtgagttgggtaatccgggctttgaattggctcacctgggacaagttctcttcatgactgccctgtaacgcccccacccaatcacgggcaaaagcaaacgcatcccaatacatatttagtgccgcttcgattgcttgattttcggcttgttgttgtttgagcgccatggtcaattgagtcatccggcttaaagcatgctgcatcgctaaaacttgactgattggcatcgccgtttcgtagccagtttgcgccaataataccgcgctttgttcgtgcatcgtctgcaatattgcttgttgtgcttgtaaggcagctgtcttggtttgcttttcagcctgcaacacatccaacttagcgagcgcttgttgccaagcttgtttttgcactggttggtcatggtcagattgtttattttgccacatcatgtaaccaccatagccaagtgcggctagtccaacgaccgcaatgactttcagagcgcccggcaagaaaagaccaatcatgaatatgactacgccaatcagcatactcaattgactggcacgtccatcagtcgttggcgtttcttgtggttcaacctgactaactgccgcgttttgcgtggctaattgcgcctctaaatcagccagttgcttggtcagcacttgactggtcgtggttgccccattcatttcagcttcggcttgttctagttgtgcgcgttgctcatctgtcaacggatttggtagttgatccgtttgccattgatactgcgctgctaattgggctttttcgctagcgagttgtgcgctttggttttgccgtaatccaagtaattgaatttgtttttgctgttcatttaattgttcaaacaatggcaccaacgtctcttgattagcttgataaaatcgaaattcacctgtttgatccaatgtttcttgaacagttgctacctcggattttgcttctgctaacgcctttgcattgcgttctcgttcgaccactaatgcttggtattgttcgtcaatcgttaagtcaaacggcgttgccttttcaagtttagtttgaagtgcttgccattccgcataacttggccaacgatcaagcaaatgttgcaactgcgcttggcgttgttttaattcagccacttgcttttggtgttccgtcatcgtcgcaacggtactctgcaatagacgtgcgttcgtttcatattcttgataaccacgactagcttcgttaacggattgcactaactctggataattcttcaaagcaacattcaatggccacttacgcccagagggtttgaaaattttctgactgtccttatccagttccttggcaaaatcgagccactcatgactccccaccgcaccaatcgtcaataaatgctgcaaaaaatcagcctgttttagattaaatatctgatttaaatcctgttggttcgtttcaaaaatctgcgtaaacaaagcttcatccgctggtgccaagaggtcagctaagtaatcagcgccaaattcttggccttgatcgatgaccgttacgtcgcccccaaacttaccggaaagccgccgaatcacaatatcgcgatcatgatagctaaccagtaattcaccaccgtattgcgcgccgtttttgggcacatattgttcataccgttgtttagcggtcgcaaagccgaataacacgcctttaataaaggctgtaagggttgtcttccccgcctcgttttgaccataaaggacttgatagtcggtattcaaatcaatcgtctgatcatgccacttaccgaagcccaaaatggtgactgtcttaattcgcatggctaatcccccatcttcttctcttgtagaattgtcgtgactaagtccttgagatccgcttgaaattctggtgtttcaattgcttcccggataaagttttccttcattaacggctttgctttttccagaatattgtccggtgtcaagatagctgcagccgcttggtcccagtaggcttggtcaatctgactaaattgctgttgtgctgcaaaccgcaacttcaacgcgtatggccaatacagtggttcactattttccaattggtcttgtaagactgccaataattcaccattattaatccgttgcaataagtcactcgataatcgctccgcgtgtgttagctctagcgccactaaactagcgtgatcactttgcatcaattgggcactcaaagccgtttgcaattgagttaagctcatgtcaggtgtcacctcaaactgttgacgttgccactcaatgaccgtcgttggtttgaacgttaaatcgaactgaccatctttggtgtccactaaataaaagcctttttcaccaggttcattcttatgccgcccttgtaagttccccgggtaaacaatcgctggtcgttcttggagaatctggcgcttatgaatgtgacctaatgcccaataatcgtaatggcaagcgttcaattcactaatcgtaaatggtgcgtagtgatctgtatcggccgttgctttttgactaccgtgcaacgtcccaatcgtgtaagttgtgctggcacgttgtggaaaatcaaccactcgatcagctgacaaccaccgttgatcataactgaaccctacaatggtcacactctcatgtcctttggtagtcagttcaaacgactctacttgtgctccaaaaacatggacattggcgggcaattcaaaatgcacttgattggcatcccagtaatcatgattcccgtaactcagatagaccggaatgtcgacatctgccaaacgttcaaattgttgttttaaaaatttctgaactggcaaactctgcgcttcttgatcaaatgaatcaccaactaataatacaaaatcgacggcttcatcgatggctgtctgaattaattttttaaacgccgtgaaagttgacgcatggattgtttcccacaatgctgtcggtgcttgttttaatccgacaaacggactgtcgatatgggcgtcagctgcatggataaatttcatcttgaaaaaccccattcttttggccggtcgtaaccagcttagataagcttcattataccattgccacgcggtgtgataaaggcgatcagaacaaacgttctgtttttaggcaataaaaaagcggtgaatcgaaatcaatcgattcaccgtttgaaacgtgcttctggttgcaacaacttccgcttaatttaaaaatcgcgttaatcctagaacctggattaacgcgatttttgtattaatgctcagttgctgaccgcaatcagtcacactcttatttgaaacgtgctttttgaaactgacttttccagttaactacaaaataagactgatgacaaaatacgccatcagtctcatttttaggttaatcctcaaagccaaacccgtttcaaacgcattctatgcttggtagatatctgcgattggttttgagatgatttggtttaattcatccattgtttggcttaattgacgttcttgttccatcaagttcttgattgcgtcgatgtccccaattttttgagcaagttcttggatttctttaatttcgtcgtccgttaattcttgaccttgcatttgtttttgttgaagtgtcatttgttgcgtttggaatttcttaaacattgtgaaggcaatatcgtcttttttcaatgctgcaaaggcattttgtaagcctaaaaattgtggtaattcttgcaagtgcgttgccatttggttggcatcatcataaatattaactgtcattgtactgactcctttttccatgtatttaattgaaaaaacctttcaaattattataccattgattggctgtatctttcgctttatttatcccatctttaaaacccgattcaattgaatcgactaattcgttcgatgtcccactctgttcttttttcgccaacgattgagcatcttcagtatcaaagtccgtctgtgctgtggttggtaagagttgttgcatctcatatttaaagattggtgctaaaccgtcaatgctagtgttcttcataaagtgatcttgatccgtcttgtcataccccatccaagtcgcaacaacaatatccggcgtataaccgactaaccattgatctttggtcccaaagccataactatcaggcacttcagtactaccagacttccctgcgacttgatagccgttgggtttcgcataacgcccagtcccattattataaacgcccaacatcatgctagtcatttctttggctgttttttggctcataatccgtgtcttggatggttcggtattatcaacaatcacggcgccactcgcatcaacaatcttccgaataaaatgtgtttcagacaattcaccgttattcgcaaaagccgtataagcactggccatttggtaaggtgaaaccccaccttgccaaccacctagagccatcgccaagttttggtcactcttgggtactgaaatgccgaatttttcgaccgacttaatgccgcgtttgaggccgatttgatttaataaccaaaccgccggcgcatttgtactgttggctagcgcctgatacattggcatcgatccggtataaacgttatccgggttcgttggtgtatagtggttagtcccatagctttgcttcttatcttcaagtgatgaatcatagtggtagccatcttctaaggctggcgtataaaccgccaatggcttgatggttgatcccggttgacgcttcatctgtgtaatgcggctataaccacggattgtatactcaccacgaccaccaacgacggctgataccccgccggttttcggatcaattgcaactgaactaccttgaactaaggtgtcatccgcagcgttatcagggaacaaccaattttgtttaaaggtggtttccatcttactttgttgggattggtcgagggcagtatagatcttgtatccgttcttaacgaggtcttcttctttcaacccaaagcggttaatggcttcattcacaacctcatcaaagtaatacggataacgatacccatccgactgctcgtaggtattcgtcacgacaagttgctctttcttagcagcgtcggcttgtgcttgcgtcaacttgttattatcgaccatcaagccgagaattaagttccgccgcgcagtcgcattatctaaatggtcagccggattatagaaactagggctccgcaacatcgctgcaatcacggcgccttcactagcatctaattcactcgcattcttaccaaaataccgttttgacgcatcctgaacgccccacaccccgttaccgaagtaggcattattcaaatacatcgctaagatatcctgtttggaatagaccttggtaatctgaacagctaagaataattcctcaaacttccgcgagaacgtctgcttctgactcaacttggcattcttggcgagttgttgggtaatcgtactcccaccaccggtaatctgcccatgatgaatcactaacccaactgctgctcgtgctagccctttaatactgaatccatgattggtataaaaggtccgatcttcagtcgacaaaacagcattttgaatctgcggcgatatcttatcaagatcgacataagtccctttttgcgaatataacgtccccgcgcgttcatccttaatgtcataaagcgccgttggggtttgtaagttggccttaatctcaccgacgttagccgtcttcgctttaaacgtgagccagctgctcatcgcgaaaatgagaattaaaacagcgagaatcagccatctcgtcaattgtagtcgataccagacataacgaatcacgcgccagacgcgtttcataaattgtttaatcgccaaccaaaacggcgaagcttgcttgttcatgcgatccctcttcttacggtcaaaattaatcttgtttaattgtagcatattcgtcaattgacactgatgccaatcgaagacattaacaatcttttaaaatttacttttacaccaattttcgctaaactaatagcttaaaggtggttgaactctaatgataatttaccaaaaaaaagtgactttagcgcccgactttagtccgatgtctgtccgcggcctgctgaatcactggttagtgccgcaaaaaatgcaacatttcttgcggattaatcaagatattttggtcaacggacattatctcgccttcaaccgacacgttgaagctggcgatcaaattacgatgaacttctcagaagtttccgttaaggtccaagactacgaacttgatgaacggcaatctttttccgttttatacgaagatgatgatttactggtcgtcaataaaccggcggggattaaaacccatccgaacggtcctggtgaaaacttcaccctaatgaaccaagtggcggcctatcttgctaaacaagataaaaaggcctacatggtccaccgcatcgatcaagcaaccagtggcgtgctcttgattggtaaaaccccaatcgtcatcggcattttaaaccgacagcttagtcaaaaaacaatgtcgcgccaatacatcgctattgctaacgatccggaacaaacactcttggaacatgcaacgattaacctcccaattggtgtcgatccatacaataagcgcaaacgcacgattgattacatcacaggtttatccgcagtgacccattaccaattactgcatcgaaaaggacctgcagcaaccttggcagtcaacctcgaaacagggcgaacacatcaaattcgcttgcacctggcggctgatggtcatcccattttgggtgatccgttgtactttccaaccgattcaacacagcgcctactactccacgggcaaacgttgcgctacacagagcccttcacggataaacaaagaacagtaacagcccccatcccagacatttttaaccagtatgtagattaaagagtgagttatcagccggatatctcctgaggattaacacagaacatgtttagctcaacaaaataaggcgttgcgacaaaaaattacttttgtcgcaacgtcttatttgtttgcttatctcgctgttgctagatgttgtgcgaaacgttcgtttaattcggctgctagttcctcactagggctaatgataacaatcgtatcgtgacccgccagcgtcccgacaacttctgggtaccccaaatcatcgattaaggctgctaataaattcccgttacttgggagcgtcttaattacgtttaacatttgcacttgtgtaatggacaaagccacttcacgcagtttatcttttaatttctgagtttgggtgcgttcgtcatcgtgaaaaatcgtatagcggagctcaccgttcacatcccgtgccttaacgatttgcatctcccgaatatcacgtgaaatggtcgcttgcgttgcatcaatcccatcttgtttcaacgttgctaataaatcctcttgcgtcgaaataacttgctgattaatgatttgttcgattcgtgcttggcgatctccttttttcacgactgccacccctttttaccttaattggctctattataccagtttttatcaaaattcgatagacagcgctttatataattcaaaaaagcgcatgttcataacttttttacccacaaaaaaagagcgccgattactcgtgtgcccttttaagattaagctttccgtgcttttcgtactttaaatgtggttaaaattgcgaccgcaacagcaacccttgccaaaattgagaggaagaacaaaccaatattattggttgcccctaacaccccaacgattgggccaccatgtggcactgcatcggtgattttgaagaccatcccgactgcactagcaactgctgaaccagcaatgatacttgggaaaacttgttttgggttagctgttgcaaatggaatggcgccttcagtaatcccaatcaagcccattaagatagctggaatcccagctgatttttcttcttctgtataaagatcgcgacgaacaaatgttgcaatccccaatgccaatggtggaacagcaacggcacaagcaacagcacccatgatttgtggatgtccagccgtaatcgatgccaccccgaataagaaggccactttattaactgggccacccatatcaatcgcgaccatcgcaccaatcacaacgccaagaatcacactcgtttctggattttgtgaaagggccgttaacatatcttgtagtgccgtcatcaaccatgaaataggtgcgcctaaaacgagaattaaaacggctgagataatcccaacccctaataacggaatgacaaaaattggcatcactggccgtaaatcttttggtacgggccatgaattaaaccatttaaccaagtaaccagccgcaaaaccaacgataatcgcaccaataaatccagtcccggcttttgtaccaaggatgtctgtattgttggcgaccattgcaccgatcattgcgggtgctaaagctgcacgccccgaaatagcataagcgatataaccagtgagaattggaatcattaaggtaaaaccaatcgtcccaatctgattcatactactccaaatggtatgtggtggaatcaccattcctgctttagtcggatgcccaccaatcgcgattgacaaggcaataaacaacccaccgacaacgacaaacggaatcatatgggaaaccccatttaataattgcttaataattggactttgttcatgactgtcctcttgtttagcttctgttttcggctgattcttgccataaatacctgccgttagtgctttttcaatcagtgtatcagaatctttaatagcttcagcggtcttcgcatatagtactggcttgccattaaaccgttcttccccatcaacggcaacgtcagcggcaataatcacgaaatcggcatcagccacatctgcggcgcttaattcatcctctacccctgaagcgccttgtgtttcaatcttaacttcatatccgcgagcttgcccggctttttgcagtttttcagctgccatataagtatgggcaatcccaactggacattttgtaatcccaacaaactttttcatcttctaaatcctcctagttaaattcgatttcatcgttaactaacgtgtagagtgccattgcatcatgccgattttgcttcaaattatgaataaaagcgtcatccatcaacttgcgcgcaaacttcgacaacacttttaaatgcgtcttattagggtcatcgagcggcataattagggcaatcgcgatttcaactggtgcgtcatctaatgcttcccaatcaacaccagtttcaaacgtgacaattccgacaactggttgagttaatcccgccactttcgcgtgtggaatcgccaccccattcccaaaaccagttgtgctctcagcttcacgcgcattgaatcccgcggttaatgcaacccgatctaacccattcttatcagcaaataattgcgctagtgttgctaatgccgtcggtttatcatccccaacaacgatatctgtaaaaatattttcaacatcaaattctttcatctggtaacactccattctaatttttctgattcaattgtgccaagatggcgagggcagccgtcccatcagatgcttgtgcgacttgctttaaaagacggggggtttcaatcaattggtctaaatcatgataaatcgcccgcatttggccatgaacagtttcgttcaaggccataaagaagacgagctgcactttgtcgttgtgttgccaattaatactttggggtgcaatcagcaacccaatggctggcttggtaattaattgtgaatccgcatgcggcaaagctactcgaccaagtgccgtacttgctaaagcttctcgggccagcgctgcctggacaaccgttggctttgcatacccttgatcaatgagccgctgaccaattaattcaattgcgccttgatccgttaactactcttgcgtgacaattgtcagttcgggttgcaataaagctactaagtgattggtaggcgtcggttgttcagtaatcatctggcgaatgattccaatatcatgccgatttaacaaaggactgacttcaatcaccggcactgacaaacctttaatcgcaatcgtactgatgactagcgattccttaatcggggttgcaagtagttctcccaaggcaataatacgagtaatccgtaattcttgagcaaacgttttggccaaccgttgccctaataattgcgatgtcccaatgccactactacaaaccaccacaacactcaagcgtgcatcttctgaatgtcgttcaaaaaaagcttcaaagtgtaaactaataaaggctaattcgtcctcattcatttgaatctgatactgattttcaagcaccggctttagtaacactgcttgatcaaaggcttgcggaaaattctggcaaatttcatcagtatatgggttattaatactcaatcccattgcaagccggcgaagtgccgaacttaaatgaactgctaacccctgaattaattcctcatcaactgctaattgagcaagctgttgccgtaatagttgtggcagcccgactgattgccgcaactcggtctggatagtttgaacagatgtatccttcgattggaccgttactaaatgacggttgagatattcctgttcaaaatccggaattgtcaattcaaatcgccgttctaaaatctgtactaacagctgtgtttcggcaatgaacggtgtcaccactggttgggctccattgcttccaccagttggtgctggcatcatcagatgaatcgctaacgactgaaactcgtaatcagtaaatgatagcgtacttttttcaattaattccgctaaagctgtgagtatgtttttaatcaaggctggttcaaacagttgattcagattatccggtaattgaacatggcgcactaactgtccatttaactctttagcctcagtccgttttccccaatactgactgattaactccaccgttgcttgccgcttttgatgctcagaaccgattaaggataaaccggtatgcgtgattgccaattgaagaccgaattgcgcgagtttttgctttacctttttcaaatcattctcgactgtactccgactcacgtatagggtattagaaagttgttgaatcgtaatcgatgctgaacctaataataatttagccagaatgcaatgacagcgttcttccttggattggggacgatcattggcctttttttcaagatgattggctaatgtcgcgacatccccggtaaaataaataccgtcattcggttttcgaacgagtttcacattaaagggctctttcgatatcattcaaggtggttgcaatggtgcgctctgaaagctgtaactgtgcggcaatgtcgacatagtacgttttatgctgggccaaactatattgaataatagcgtgttctcgtttgttcatgcttatcgcaactcctcgtttcaatccctctacgctatctatagtctaatgtttatgtatccgcttgcaaacgtaattatttgcaagattattctggtaattattgcgcaatgctccataagcttttcttaatcaaccggttatgctggggattgtttatttagttgctagcctaatccaatccattaccttatccggtcaatttatcgcacaaaaaaagagcatcttaattaaaagatgctcttactagatatgttttgctcgccatattcaatggtaaccccctaagtcaaaagactacaaacataatcctttaacgcgggctgttaaacctcaaaatgtgccgacacgaacatattcaattattttttgatattgtagaatgagttgatacctttgtatgaagctgtatcgcctaattgttcttcaatacgcattaattggttgtacttagctaaacgatcagtacggctcattgaacctgtcttgatttggccagcgtttgtagcaacaactaagtcagcgattgttgtatcttcagtttcacctgaacgatgtgaaacaacagctgtgtagccagcttctttagccatttcgattgcttctaatgattctgttaatgtaccgatttggttaactttaacaagaattgagttagcagcgcccatcttgatacccttacgtaggtaatcagtgtttgttacgaagaagtcatcaccaacaagttgaactttttcgccaagttctttagtgattgatgcccagtcttcccagttgttttcatcgataggatcttcgattgaaatgattgggtatttagcaactaagccttcaaggtatttaacgaattcaggtgttgtgaattcttccccagttgaccaacgtaatttgtatgtcttgtcttcgttgttccataattctgatgaagcaacgtcgatagcgattgaaatatcttcgcctggtttgtaaccagctttttcaatagctttgatcaagtattgtaaaggttcttcgttgtttgcgaagtcaggtgcgaaaccaccttcatcaccaacagaagtaactttaccgtcagctgataaaagactcttcaatgcttggaaagtttctgaacccatacggatagcttcgcgtacagatttagcaccaacaggcataatcatgaattcttggaaatcaactttgttatctgagtgagcaccaccgttgataacgttcatcattggtgttggtaatacgtgagcattagggccgccaagatattcgtacaatggtaagcctaattcgtcagcagcagcacgtgcagcagctaatgaaatacctaagattgcgttagcgcctaatttacctttgttttctgtaccatctaattgaatcatagcagcatcgataccgcgttgatctgtagcgtcgaaaccaatgatttcttttgcaagaggaccattaacgttttcaacagcttttaaaacacctttgccaccaaaacgtgatttgtcgccgtcacgtaattcaacagcttcatgttcaccagttgaagcacctgaaggaacgattgcgcgaccaaagccgccatcttctgtgtaaacttcaacttcgacagtaggattgccacgtgagtctaaaacttcgcgacctaaaatatcagtaataattgacatgtaattttctccttttttggctaatgctaagcattagcgcttttttggatgtcaggcaaagcctacatctattttagctaattttacgccattcgtaaacaggaatgcgttaaaaattagtcgttaaagtgaactaagtctaagaatgaagcaggttccatacttgcgccaccaactaaaccaccgtcgatgtcttctttgcccatgatttctttaacatttgcaggtttaactgaaccaccgtattggatacgaactttgtcagcaactgtttggtcgtataacttagcaactgtttgacgaacaacagcacagatttcttgtgcttggtcagcagaagcagttttaccagtaccgattgcccagattggttcgtaagcaatgaccattgagctaacttggtcagctgaaaggcctttaagaccttctgttacttggtttgaaacccattcttcagctttgccagcttcacgtgtttcaagtgattcgccacaacagaagataggtgtcatgttgtttttgaagattgcgtgtgcttttttattgatatcttcatcagtttcgtggaagtaatcacgacgttctgaatgaccgatgatgacataatcaacacccatttcattcaatgtttttggtgaagtttcgccagtgaatgcaccagcatcttcgaagtaacagttttcagcagcaacttttaagtctgtgcctttagctgcttctaataaagcaggtaagtcaacagcaggtgcaccgataactgattctgtttgatcaaacttaggtaagttggctttgatagcattcacgaactcagttgtttgagttgggttcatgttcattttccagttaccagcaatgattggtttacgcatgagaaaatctccttttaattttaaattatttgtctgaaatagcagcgataccaggtaatgtcttaccttctaggtattcaagtgatgcgccaccaccagtagaaatatgggttaacttgtcgccaacgcctaatttcttaactgcggctgttgaatcgccaccaccgacgattgttgtagcgcctgataagttacctaagaattcgccgattgccaatgtccctttagcaaagttgtccatttcaaacacacccatagggccgttccaaacaacagtcttagcatctttaaggacgttttcgaagtcagcaattgctttaggtccgatatctaatgccatgtagccatcaggaatgttaccttcaacaatttctgtcttagcatcgtttgagaatgcgtctgcaacaacgttatctacaggcaatactaatttgtcgccagctttttcgattaattctttagccaattcgatcttatcttcttcaactaatgagttaccaattgataaacctttagcagcgtagaaagtataagtcataccaccaccgacaatgactttgtcagctttagctaataaatgttcgataacaccgattttgtcagaaacctttgcgccacctaagatagcaacaaatggacgttctggagcgtcaactgcttcgcccaagaatttgatttctttttctaataagtaaccagcaactgcaggtttgttattagctttcatagctgttgcaatcccaacgtttgatgcgtgagcacggtgagctgtaccgaaagcgtcgtttacgaacatgtcgcctaatgatgcccaatattcgcccaacttaggatcgtttttactttcgcgtttgccaaagtcgttgtcgatgtcttggaaacgagtgttttccataaccaatacttgaccatcagtcatcgcattgattgcatcttctaatgctttgccttcgtttgaagcaacgaaagcaacgtctttgtttaataattcgccaagacgtgcagcaactggtttcaatgtcaattctttcttatcttcgtcactcttgatacggcccaagtgagaaagtaagattgccttgccaccattgtcgatgatgtattggattgttggtaaagcagctacgatccggttatcgtcaccgataacgccgcctttgattggtacattaaagtcaacacgtactaagacttttttgcctttaatatcttttaaatctgcaactgtttgttttgccatgtggacaaacctcctagattttcataaaaaaaggcggaaggagtttacctcctcccgccttataaaatgctatcgcattcctaagttcacaaaagtgaaattagattaagctagcaaatttttctaatgtacggatcatttgagcagtaaagcctgattcgttgtcataccaagcaacaactttgacaacttggcctgcgccaccgccaacgatttgtgtttgagtaggatcgaatactgaaccgaattctgtaccaatgatatctgatgaaacgatttgatcatcgttgtaaccaaatgattggttgccttctgtaactttcttaacagcagcgttgatttcgtcagctgtaacttctttgtcaagagttgcaactaattctgtcaatgaaccagtgataactgggacacgttgtgcgtggccgtcaagtttacccttcaagtcaggaacaactaagccaagagctttagcagcaccagttgaatgagggatgatgttagcagcagcagcacgtgcagcacgtacgttaccaccacgatcaggaccatcttgtaatttttgtgtagctgtgtaagcatggattgttgtcattgtaccagctttgataccgaaagcatcgttaactgctttagctaaaggtgctaaacagtttgtagtacatgaagctgctgagatgatgttatcgtcagctgtgattgtgtcatcattaacaccgtaaacaactgtcttaacagcaccagcaggagctgagataagaacttttttagcaccagcatcgatatgagcttgtgatttttcttctgatgtgtagaaaccagtactttcaagaactaagtcaacaccatcattcttaacccaaggaatattacgtgcatctgattcagcataaactggaatgttcttgccatcgataacgatgctgttttctgtagctgatacttcgtggttgaattgaccatgagctgtatcatactttaataagtgtgctaacatgtctggtgatgttaaatcattgatagcaacaacttccaatacatcactgtttgttgcgtaaatacgacgtaaagctaaacgaccaatacgtccgaaaccattaatccctacttttgtagtcataatagaatttcctcctttaggaaatgaaaaattttttattttaaagggttgccccttgtaaaatcgagtttgcggcaccttcatccgtgattaaccacgtctgtttaggtgcaaggtgcatgtacgcttggattgcttgggctttagaagcaccacttgcaaccgccagtacacacggaatattcaataagtcacgaatctgtaatccgattcgcggaatcttgtacacgacttcgccttgtgcattgaagaagtaaccaaaggcttcacccaccgcatgcttttctttaagcatcttgatggtttcaatcggcatctcacgacgttcagccatcgtaatggcttcaccaatactgtgtaaaacaccccggcttcgttcaatcagttttaacacttcttgaacacttggttcttctaacaaaggcgcgtacgtcttctcactcacctgttcaggcacatacaatgcccgatgcttaccacctgtctgcttagccatttcggcacagactgcattggcctgaatatcaacactttcaccaattccccctcgagctggcacaaagattagattgcgctgtttcgatagatcagttgaaagttcatgagctgcttcagccatcgtcgttccgcccatcactgccacaatactttgcccttgtggtaataataattgtaacgtactattgactaatttgcccatttcggtgaggacttttggttgttcatcactattgccagaaacaatcaagcaatgttcaatgcctaagacttgactcaactgacgttcagtctgatgtaaccctaagaattgatccattacttgtcttaactgatcgaggatttcattccccttcacggttaaaaccatacctgatttagacgaattaagcaaaccttgtgctttcagaaaatccgtctcagttctaattactcgctcgctcatcttcagttgttccgcaagcgttcgtcggccaactggcgcgagccaatcgatatgttgtaacacctggtaacgtttcttaatgataccgacgaaatctggcgcaaccgcttctattgcagataattcatcgcgcaattgctatcgcctactttccgtgggacataaaatgtccatctgtgtcattagtcgacccatggttggcaaaaaataaaaggcaacttactaaaactagtaacttatccttttgaacaagaccattataacaagtgcagaaaacagatgcaatgctttggggttgatgaatacgttttctttccgaatattttttaaacgttgatttatcgcgatttatcaaaatttacacttgaaatttccgcttaactccgctaatataatatattgtactgttgagtacgcggaatgcgtcgctagtgtaatggatagcacccaagattccggttcttgagatccgggttcgactcccgggtgacgcatcatttataaaaaatcccgttagaagtaaaatacttctaacgggattttttattgtactaattctgtaactgacgagaatcaactacttctcttgcatttgtatctttttttaattggagttcaacacttgcaccatctggttcatccaatttttcattttcaaaactaacgctaccgttatttacggaatatctaaatttatgctgagaggcatcaagttggatgacaaacacgccatctgctatttggtaactactattaaatgctgtacccatacttgatactcgcacagtcgtgtcatctttaatatagccgtttgtataaccatcgtgaattaaattttgtggcgctcgatttgcttccatcgcttctgtggcatcttcaccattgtactttacaggcgccattagaaatccgtctgctatataatcaacgtcatcatctgccattgttgtagatgacgttgtatcatgattgtcgtttgatgactctgttgatgccatactattactagattcactaatcgatacttgttcttcatcgctactattatgtctaattgcaatcgccggatctgcagatggttcctttgttgattcagttctagctgttgtgcttgaactagtggctgattgttcaaccacacgtttcattggcgttgctttagaaaaataaactgcgcctcctgcaattatgattaggataacaatcgtttgaataaataatgcttttcttctttgcgatctaacctgaataaaatcgtcgcgccattgcggattattccgtcgctctttataaaaagcatatgtatgtttggtccgagttcgcgcgcttaaatattttttggtcattatttccacaagatagctttagtaatttcattcatactattaacttaataactataataaactcttcattaaatacaaagattaatcggtattacacgcttctatatttgttgtacaattatctcattacgagtccaattgaggagcacccattcaatgcagtattttaaaaccctatttacaagtacattcacttttttaaagcagtcccaggcctattttcgtagtgtgttattgatgcatggctttttgcttttaatttgtctaccgcttttgagtaaagccagctacttcattctggtacataatcagatccagtttctcgcgttgagcaacttgccagcgcttattcatcagcatccgattgcgctgttagcactcgtaggaattgcgctactaattttattgctggctttcttcgaattcacgtttcttctattaagtgtgtactttattcagattaaacggccgctagctttgcaggcattgctgaagatgacttttgcgcaactcaggcaccttcgaattggcacgttctttttctttctatattattgtcttttaattttaccgctgggcgggcttggctatcattctgatttattgactaagtttaaaataccggcattcattctgaattatattctcatgaatcggcgaattgtcgcgggacttttcattcttgtctatttgggcttattatatctcggcttacggctgatcttcaccctaccaaacatcattcttcagcagatgactttcaaaaaagcgttgaccagtagttggcagtttacacatcaaaaaattggctcattactggggcgtctactcttaatcggtgccgcactgattggctttacgggactcacttttttcctactcatccaactacaagcgttgattgaaacccacacatcagtgggactgccaagtgccgtggtcatcatgaccttgttgcaagctgctatgctcatcaacttggtgctttcgacagtcgccgtctttttcatcgtcattgattatttgttggccgacccacaatttgtgcaaccgacgttcaactatgcaaccttaaaattaagcgtgccgctcagtggtcgttggttattattcgtagcaaattgcgttttaatcggcgttgggacttataattgggactatctccgttcagtaaccattcagcagccgctaagcatttcccaccgtggcgtttcgcaaaaagacggcgtccaaaattcgattagtgcgctgcgaaaaactacccgattaaagcccgattatgttgaaatggatgtgcaattgactaaagatcaccaattcgtcgtctttcacgacttccaacttgccccactcactgggcactcagggaccccgcagtctaaaacactggcgcaactgactaaaatgaccgtccatgaacatcggcaatccgcaccaattgcttcatttgatgactatcttgcacgcgccaatcagcttcatcaaaaactactgattgaaattaagacacccaccaccgataatcccggcttggtgcaacatttcctgaataagtatcaggccaatatcgaagctcacggtcacatggtgcaatccttaaactggcacatcgtcgaggccgttaaaaaggcagcaccgaagattcaaacgggctacattctcccctttaattttatcggcccaccaatttcgaacgctgatttttatgccgttgaaatgacaactgtcaacagtcacttcattcaagctgcacatcaggaaaataaggccgtctttgtctggacacccaatgatcaacaagccgtccaacgcatgatgtatttcggtgcagacggcgtggtcaccgacaatctcaccgcggttaagcaagctaaacaacaaaataaccaacgacactacgccgataaactcgcatattatgtgatcggtattgggtaatatagtaaaaaaggattgggaatcgatatttttatcgatccccaatccttttttattagcgattctttctaagccaacgtcttacacttgaatagccaagcgtaagccccgttaagagcaatacaccagctgaatacacgaatccaatgacaatcaccgtcttcatcaagcctatttggcgaaccatgtcagcacaaaaagcagccatcaatcttcaattgacagctgcttgcactttatttgtctaaaagtcgttgtgctttttgggcggcgacgttcatgatgttccaaggacggtcaaaacctggttggaagaagaagtcagcatatgctaaatcatcgattgtcatcttaccttgaatggcaagtgaaatggcgttgatgtttgccgtcacgtcagctttagacatgatttgcgcaccgagtacacgccgtgtttctggatcaaaggttaatttgaaatcgaccactggattttctgcttcagggacgaagtgtgggcgatatgtttcagaaaccaaaacagattgggtcttcacacccattttatcagccgttccttctttaatcccagttgaagcaaagtgataatcgaagacgctcaatgctgatgaacctgaaacagcgggtaccggttggttggcggtgactaagttcttagcagcatagcgaccttggcgacgcgcattcgttgctaaagcaattggcatttctttgccagttggtgcgtatttcacaaccgttgcatccccgactgcaaaaatatcgggttggcttgtttgtaagaattcattgatttcaatccggccgctgcggtcgagttgtaatgtatcttttaaccagcctgtgttaggccgaatcccagcagcttcgatgactaagtcagcatcgtattcagcttgatcggtcacaactttagttagcttaccgtcaacgccgacatattctttgacgccttgaccaactgcaggatagatattgtgcgcttgcatttcagccgttaattgatctgtaaattcttgatcgagatagagacttaatagacgtggcaagacatcaacaactgtaacatgtttgccagctttagcaaatgcttcagccgcttcaatgccaatataaccagaaccgatcaccacaacatttttaacggttggatcaactgtcttcgcctttaatttaatcgcccaatcacggccacgcattgcgtagacattctctaaatcacggcctggcactggtaattcaaatggcacagcgccgacactcaagactaacttatcgtaactttcttcacgcgttgtattattctttaaatccttcacttggaccgtatgttgatcggcgttaatcgcggtgattgcttgttgtaggttgacttcaaccccttttgcccgcatgccttctggtgtcgcataactgacatcatcaacgtttttgacggtcccttctaaatagagttgcatcccacaggataagaacgataggaaatcgccttgttcgtaccattggatggttgcatccggataatcgagtaaactttcttgaactgtttcaaatccaccatgagatgaaccgacaacgataattttcacattgatcactccttgttctattttacacaactcaagtataacgcatatgatattaattacaaataaaaacgcattctcggctgactttcaactgaccattcttaaattccatgctagaatagtgacaagctttacaataaaaaaacaatggagattgctatggcctttatcaaacgaaacttccccacttttatctatctagcaacactttatctcacctatcagattctaaatactttgattcgcatctttaccagtaccgatattctcgtctacgccaaagaatcattaactattctcatcgttttcttcggtattttctatttctcatatatattgttcggcgttggcttattatacgctggccacgtcatttcgaaacaatcgggcaactacgaaatttcactcatgattttaaacatcctcaccacttttagtacccttaccacgattattttaaaattttctgaggcgcagatgccgcgtttcttactttcaaccacttttttcatcattttgaccaccatctcattagccacaacttccaaactgctacaactgcgcaccaagcgaattgacaataagtgactgccaaaggtgaagtagcgtctttttatgttaaggagacatttttcatgaacggtaaaattgattactaccaactctttcaaacaatgtatcggcaatatgggccgcaacactggtggccttctgattcccattgggaaacaatggttggcgcggttctagttcaaaatacaaactggcaaaatgttgaccgctcgctcgccaatctacgatcaagtacgcacttcgagccaaacaatctgctttctctttcggatgaagcccttatgttggctattaaacccagcggcttcaataacgctaaaagcaggacaattaaagggctgtttcgatttttagcgacagttgattttgacttagacacgctcaatcagatgacaaccaccactgacctacggcgccagttacttgccatcaaaggcattggtccggaaacagccgatgtcattttattatatgtcttcgaccgcccagtctttatcgctgatttatatgcccgccgcttaattgctcacctagagcactgttctttaaaagacctccactatttaaaggtacaacaggttattgaaccacagctcttaccccaaatgactgttaaagactgccaagaatttcacgccctaattgacgatcatggtccagcctttcttgcagcacaaaaataagccgacatccgtttttagacggatgccggctttttaattatccaacaacccctttgcttgtatcagctgggtggaagagttggtcaataatacccgaaacgcgggttaaatcaacattcccgcctgaaactaaagccacaatatttttatctgttaaccattgaggatcaattttaccactcagcagtgctgccgttggtaatgcaccagcgccttctgtgacaatcttagtccgttgcatgagatccttcatcgcagttgcgatttctttttcggaaactaaaatcatttcatcgactagattttgaaccactgggaaagtcagttcacctggaatcgcaacgtctgtcccatcggctagcgtgaagtccgcatgatggctggtgattgtgcctgcttcaaatgaagccgtcatcccgtgcacgttttccgattgaaccccaatgatgtgaattgaggggttaaaggatttcaaagccgtcgcaatgccggagattaagccaccaccgccaaccggtacaatcaccgtatcaacattccaaatcgcatccaaaatctcaaggccgattgtcccttggccggccatgacttcgcgatcgtcgtaggggtggacaattgttaagcccttttcggctgctaactgctccatgtacaaccgcgaatcattaaaagtcgtaccatgtaaaacaacgttcgccccataaccggcggtcgcttgttgcttagcaagcggtgcttcttctggcatcacaacggtcgcatcaatccctaataacttcgcggtcaatgcaaccccttgcgcatgattgccggctgaagctgtaatgatgcctttagcccgttgctctggcgttaaatggttaattttattgttcgcaccacggaatttaaacgatcccgtcagctgcatattttccaatttcaaatagacatgaccgtgcgccacattacgactcaagaacatcgattgaattaaaggtgtttcgcgaatatacggtttaatggttgcccgtgcttcctcaatatcccggatatcgcaaatgtctgcagtttttaatactaattgattcgttgccattctggccacctcttccatttgaattgacacaaatgtctgcggataggttgtgctatccttcacaattaaatgtaagccacttatcaagcattgtcaaaacaaaacggccttaaattagaacgctttcatttggtggttattaagttctcattctagttgtttaaccagcaagatagcactagagtagccatgaaataaaatgatgaggtgttcaacatgaccaaatcagtcgttaactttttagctgtcattataatcgttcatttaaatcattttatctacaatgtgctattaaaaatagattaacgagcatatggagcactattgaacatctaatatccttcgtccaaaaataggtactgcccaatatccatccaaatgaacaataaataagccaattatagtcaattttcagctgatgcgcacacccaaaagcaagccctgatacaataattttcatcaccgtatcgcattcgtttttttaataaaaaagagattccccgatttaaaattgaagtgcaacacttgataactagaccaattagactagcttaaaaggccatgaaggcctattcttattattaacgacaaaatcaacagataaggataggtgtcttcatgacccaaactaagaatatcatgcctaagcattaccaacaactccaatcttttgaacgcggtcaaattgagtccctgactcgattaggatttggcgttcgtcagattgccagccggcttcaccggagtcccagcaccatttctcgcgaattaaaacgcgggttaaccacccagattgattcccagaaacatcggtcatatcagggctactttgccgagcgcggggcggcttactatcgagaacagcgggccaagtgtcaccccaaaggtttactgcagcgggctgccgtgttcttcaagtccctgccgaaagctttaaaagctaagccacgagttttcagtgtcgacacgtatgtccactatttcaaagctcattacccgggctttccctgcccatcaacggctacggtctatcggtatatcgaggctggcaagctcccggagcttcacaactatgatttacccatgaagctacgtcgccgcgttaaacgcccgaatcaccgacatgcccgcctgaataaaaaacggcttggacagtccattgaagaccggcccgcagtggttcggaaacgtcaggagttgggccattgggaaggcgacttagtgaaagccaaacgggttgagtccgaaccagctttaatgacgttaaccgagcgagttagccggatggaaattatcgttaaattgcctgattaccgggcagagacttgccggcaagccctccaagatacgattgatgattacggtgcagaaaactttcggactatcacgtttgacaacggctcggaattcgctagtttaaatcaggttcaaggaacggaaatctactttgcccatccatattctccctgggaacggggcactaatgagaatgtgaatggtcaattaagagagttcttcccaaaggggtattcctttaaaaacctctcattagtggatctgcagttggttcaagacacgctgaatcaccgtccccgccgctgtttaagctatagttgtccagcggatgttatgccacaactggtttaactttctagaccaattataagaataggccattagtgttgcacttaacttgacaattgaggtaaaaaagagattaaagaaaataccagaaataataattcttctagtgttggtgcaaacaaatcattgctgagtgtcgtcaaaatcggaacagccttcattagctcattaatatagacttgattctccggcagcgctaatgggttccaacgtttatcgatccaatcaatcactagcacgataccaaacatcactaaaataagtacaactttctttagcatcggctctctttacacattttgccagtcaggttttggttgtctcatataaattctagtaaacaaaaagactattattagccacaccccaaaattaacagtaatcaatgctggttcatgcgtcgtcatataatttgtactcaacccgaaaagggcttccatatggacgaacatcactaatatcaataaaactataaaaaagctaatccgatggcataacgttccgatcttcaacaatttctttctggatcccctactaaactaataaccatatctaatcatcgataatgccgtcatttcttttaacttagcttgttgactggctgatagatccaagccttctttttgaatcacattcgcaattgcgatgttcattcggctcaaaattaatggtactgctgtcgtttgtgcttcaatttcagtttgataactacgcaaaactgattgtaatggtgccgtttggtcatcttgtttcaagtcgtttaataatgccttaatcattgtaattgctcgatgcccacgttcctgtccacctacataccatttcatattcaatcgtcccttactcttaatcaactgttgagacaatcataacgcttatctacattattgacaaataactaaaaggaactataattagtgtgaattattgttatttggaggggtataaatgataagtcaatcaattgcaaaagaaaacatccatacactttacaacagtctaatggcgcatccggataaatcaaatgcattgttagatattaccgatgttttactacaggtctacctcaaaattgatacggttaagaatcccgaggcactcgtcaatcgcctggccaattacatctatagtgttggctttggcaagattcatctcaccaaggatgaagaacacctattgattgatttaggcgcgtttggccaacgtgctggttggaacggcgtttatcgcggtgattatactgccaaagccgattttttcagctataccgatgaacataaatatgctagaaattaaaagagtgtgacggaagtctgggatttcccgagcacgcttagacaattagatttgaccatcagaaaagggattgagacaaacacaacgtttgtctcaatcccttttttaggcaagaatattgccaatcccatgtaatcctgcgcggttaataatcgtaaattcagtcggttgtaaatcagtttgttcagtgacgattggattcaactggtcaatcgtaaacggcgaagtaaacggaaagccgtcaccgtactgattaaaataagtcacagtattccccagcacgcttttcaattgctcagaattgattgcccgcgtcactgtcatcaaatacgcacgattattatcgcccgtcaaagtggtgctcgtaaaaaatttaaaatagtctttcgtactcatcactgatccccccaatctttaatcaacgttactataacgctttcaaaaaagcaattacagtatctttcgtcaattccattataatccaccatcattgcaattcatcaccgttacgccagttaacttagatacccataccacatcacttggtgactatcatcagctcaatcagaagaattacgtcccagccttacaaactgaatcgggcgatttcatgactgaatgcgccgttattttagaatacattagccaccaaagtccgctgccactaatggccgactatgccactgaacaatactggcaacaacggatgtggttgaattacatcaccaccgaattgcataagaacttcatctcaccatttcgtaaaggtaattggctccctaatacacccgaaagccaagatttagtccattcacgggttttcccacggattgcttatgttgaaaaagcgttagcggaccagtccttcttagttgctaatcaattcagtgctcctgatgcttatctattcgtcatgaccaattggtatcgacgactcgcattttcattgactgacttccctaatctggaccgttttgatcaacacatgcgacaagacccagccgtgcaatccgtcctcaaacaagaaggcaaaccacattcatcgaaagcttaaccaccaaaaaaggaatcagcagtcgctgattccttttttttttgatgatttacatcacattaatcgtgacgtcaatattgccacgagttgcctttgagtatgggcaaatttcgtctgcttttttgagatacttcattgtttcttcttctgataaaccttcgatgtgaccgaaaagatcaacaccaatataataattggcagggccatcactataaagggaaacagtcgccttaatcgtgggttcgcctttaatatgttcttggttaaggacaacatctaaggcactgttaaagcaagaactatagccggctgcaaagagttgctctggatttgtactcttccctgatgggtctgtccctggtgacttgattacatatttctttgcttgatcgggtgaataaacgaagccattgcggcccccttcattaatcatcgttgtttcatattgttttgccatttaaggtccctctttcttttattgaatacccttactttagcacagcaaaattcagaaccataatgatttgtttatacaaaaaaggcgccagccaaaaaatagattttggactggcgcctttcttgttaatcctcaggctataactggctgattattcacacgctatttaatataagccgtcttgtagctccattgtgcgccagctgtgttatgcacaacgcctttgacctttggattcttcaagtatgccgtatcattttgatagagtggtgtaatcccttggactttattcatgacttgcgcagctgtcacgaggtccgcccaacgtttgtcaggatcgttcgcatcggcattcattgcgcggtcaagggcagctttgtattctggattgtcgaagccaccggtattacttgcagcccctggtaacatgatttctaaaaacgaaattgggtctttgaaatctgccccccaacctgcgagtaataaatcatagtcgccttttttatcacgactcgctgaaacttggcttggcacggtctttaatgtcaacttgaagcctggtaagactttttcaagttgacctttgagatattgaccaacatatgacgcgttggcatcatcggaattaagcgttaaggtgagggcaactttcttttgaccagtcgatttcaatgcttcatgccaatgtttaagcgctaatttttgattgtaatccacggtatctggcacggcttgtgatttagcaaagtccaccttcttaggggagtcggctaagcccactggcacgaaaccagtaatatcgtttttcttcgaaccgaatagccggttattcaacgtcttacgattaatcgctaacgaaatcgccaatctaaagtcttggttattcaaaagtgcttttttctgttcatctgctgatttgaagttatatttaatgtagttcgtcaacgcataaggatatctatggaatgctttatcatcccgataattatcaatttgttgattatctaactgggttaaatccagtttcttttcctgataaagataaagcgcggtgctggtattttctaacacggtatagttgacttggtctaattttacctttttgcgatcccaatattgattgttcttcacaaattgccacttctcactcgtcccattccagttaactaacttaaacggaccagagtacaccatgtatttcgcattcgtcgcatacttcttaccatatttttcaaccactttttgatcctgtggggcaaataatggataagccatcaaggttttcatgtaggccacaggtgtggataatgtgacttccaacgtgtgctcatccactgcccgtatgccgagttggtctggtgccatctcaccttttgcaatcgctggggcattttggatattactgaaaaggtttgtataaggtgatttggtttctggtttcaatgtccgttgccatgaatagacaaaatcttgcgcccgaatcgggtcaccattactgaacttggcatcacgcagtttaaatgtccacgtcttaccatcagctgaaactgaactcgatttcgctaagcctggttcaattttaccgttctcaccaagccggaataaactttcataaatgttccctgtttgaccatatcccgttgaagtcgaaatatcaatggtatctagtggtgcttgcgcgccaagctgaagaacctgtttggcttgcacccccgaaacttggcataataagaacaccccgaatataaaaattgcactaacactaagttttaagaactgccgccctctttgcatgacacgcctccttacatttaataagtagagtataccaaatcatcagtcaaaagttaaataataagcctaaaaaaagaggcctttgtaaaattaacttttacaaaggcctacaatattaattagacggaattctcgactgacggcacattctaaacgtgcttttcaaaccatgttcctgcgtttagcctaattagccaaataagcggcttcaccgctttttcgtctaattttgctaatcctcagaacataaacggtttgaacgcactcttattcgaaacgtgctttcaaaagcatactgctgtgcttagctacacaagtcaaatgattgctttcagcaatcattcgccttgttaggctaatgctcgcagtatacccgcttttgacgcactctttagttcattatttcaaacaattgttttctgaattctggaccatacatgactgctccgactgggatggcgaagtctagtgcttcgttaattttagtcgtccaggttggtccgaagcccccacagagttcaataaattgaatgccttctgccttcaattgcttagcgacttcaataattgaaccatcttctttagcacgtggatcgaacccgacggtaatcatctcgcacgttcccattggattacggttaatcaccgtattttgttcaggtgaaaagtctggtgaaaaatagaaaaacgcccatttatgcaaatttgctaatgccattgtttcgtcctccttgtttgctttcatcatagagaacaatcatgatagaggcaattttactgcctcttacagccagccattatgccgtgcaatctgaattgcttcaacgcggttgcttgcatccaatttgcttaaaatcgtcgacatgtaattgcgaaccgttccatccgataaaaataatgattcggcggcttgtttcgtactcaacccattagcaatcgcacgcaatacttccgtttcccgctcagacagtggattcttcgtttgcgttgtcagcccaacaactaattctggcgcataaacaactttgcccttcatgaccgaatgaatcgccacaatcaagtcatcactcgggccatcttttaatagataccctgccacttcggtgctgatagcctgcttgaaataactcggttgggcaaaagtcgtcagaataatcaccttaatctgtggctgacgcgtatgtagttggcgcgcaatctcaagccctgtcatgcccggcatctcaatatctaacaaaacaacatctggttggagggtttcaatctgatcaagtgcgacttgtccattgacggcggttccgaccatcgtcaaatcatcctctaaatccagaatgcccgctaaagcggtattcaatagttgctggtcttctgccaaataaagtttaatcatgcccttccctccatcaatcgtttctaaccgttcgcgcatgcccacaatcccatgactcttatattgatcttcgcttttcaatccgcgaccattatcttcaatctgcatctgaaaagtcgttgcggttcgattaaaaaccacgtaacactccgttgcctgactgtagcgaattatattggtcacggcttcatgtaaacattgcgcaagcacttgttgattttgttgtggaatcccttcaagttggtcttcatttttagtcagcagtaaaatgcctgcaacgctgagattccgttcttgattgatcaattcctcagcaacggtcacttggcgtaaaccagcaacaatctcacgcaccatttttaaattctgacgggaggcttgttcaatctcgagtagttgttcgggtaccgcggccggttttttcgccaataatttacgtgcatattccgcttttagcgtaatcattgaaaatgactgacctaaattatcgtgtaaatcccgtgcaatttgttgccgttcgttctgcttaatcatatcggttaatcgctgattggtctgcgttaattggcgatttttccgattaaaacgctgaatcgagctagccgcaaatggtgaaaagatgcagaacaagccgtacaccattaagccaatcagatcatcgcgtcccatatgaccaccataataccaatatagggtgaccgctggtatgattagtgacaacagataagcgtagtaatagcgccagaaacttcggcggcgcatgggaatcgaaccaaacacccaggcagtataaatattcagataaaacgcctggataatgactgctaaaatcgcactggtcaccatttgtaagataatccagaatgtgcgataccgcgatgcgacatacccattgcgataagccaccaagaaaatcagaatcaagcccataatcgcttgctgcttaaccgtttgatacggaaacgcataaccaattggaaagagcaagaaaatcaaccaaacatatggaaataagccatattggggtggcatggcaatgtagcgtttaaaaaaattcatgcatgcatcgctcctcttttatgatggtttaagtatacgacaattaccagtaataacccagcccagagcaacgtgatgccatattcacccaagtgtgcgggttgatgcgcaatcagcgcttggccaatatgattaatcggataaaccggcaaatgcttgccaatcacgcgagctgttttgggcattatttctgttggccaccataatccccctaaaattgctaaggggaaagctaacaaattagacaccagttgaatctgattttcatcttttaaaaatgaaatgctaatcccaattaaacaaaggaggatgctggcaaaccacaaccagcccgccgttaataaccaactggaccacactaaatgaatttgattactaatcccagcaactatgaaaatgacgccgatcgttaaagcattgattaagcctaagttcaacaacttagccccataataagtccgatgactggttggtgataaatcaattaaggaaaccaagccatcccgtgcgtcattataaagtaatgtcgataaagtaaacgtgttgctgagaactaaactataggtcgccatactgaccatgtattgtcgattgaatgctgcattcatcacaccctgtttcattactttcgtaaacaagagataaaacgcaatcggcattaagagtgaaaaaataacaaagcgtggattacgccaatatgcgcgtttaaagtctatttttgtttgtaccatcattgtttgcattttttagtcctccatcatttcgctataaatttcatttaatgagcttgcttgaacctgcacatcatgaacctggatccccatcattggtgctaattgacttaagatcggatcgctcttggtaacttgcaacagcaccttggccccagtcttcgtcacgcggatcacgcctggccattttgcaaaagtagctgctggtaaatcagtcgtaaaacgaatctgcgttcctttaaattgttgttgtaatgttgccaagtcaccatcgaattggaactggccatctttcaataataaaatccgggttgcaatgtgttcaatttcctctaaataatgcgacgtgacaataatcgtcttgccggcttcttttaactgttcaatttgctgccagaatttttgtcggctgccaacatccattccaacggtcggttcatccaaaaatagcaaatccggattgcctgccatggctaaagcaaaggagaggcggcgtaattgaccacctgaaagttgggacaccatcttatgagcctgtgccttcaaatcagctagcgttaataattcagcgactgaccgtggctgttgataataactgcaaaccaattctaattcttcgatgacactgacccgagccagtcggacatttccttgcatcatcgcacccaataagttgaaatgttctttctccgttggcttctgacctaaaatccgaatctcgccagccgttggttggagtcggcctaaaattaaattaatcaatgttgacttgccggcgccgtttgcacccactaagccaacaatctcaccaggttgaacacttaagtctacctgatttaaaacaacttgttgttcgaattgcattgtcacttgtttaatttcaatcattgtcatcacctcatttaataaccctagtatagaagtgattccgttttgtcgttagacgattttgtcatgacttacggatgacaaatgtcatgtctttggtgttaaaataaagctgattcgttttaactcggaggttttaattatgacaacaagccaaccagcagcaccatcattttttacgaaccggtctacccaagccatcgcgcaagatttattaggaactcacttgctttataccagccaccaaggcacacttggcggcctcattgtggaagcagaagcctatgtcggcaccgatgacactgccgcgcatgcttacaatgggcgccgcacaccctttagcgagccgctctatcatgagcctggtacaatttatatctatcaattacgcggtttctttctatttgatatcgtgacccaagcagtggatcaaccacaaggcatcttgattcgcgccatcgaaccgacccatggcattgaacaaatgcgcctcaatcgcccgaaacctggcgtcgaactgactaacggccccggtaaattaatgggcgccctcggcattcacgataaacaactgacttttcaaaatgtggcggacgcccctttaatgattgatttagcgcatcgtcgccaccccaaatcaattgtcaccgcgctacgaatcggggtcaattataaagcagcgagtggtcaacttccttatcgctattatgtcgctggtaacccgtatgtgagtggtctgcctaagcgccagtgggacttagaacaacatggttggcaattttagcgccaatgtcaatttttaattgaaaacgatttcaccaacgctataataatcttgtgaattaaataattaagttagaaggtcattgcatgaaaattaaagcagctgttgttgaacaacaaggcgcaccatttgtcattaaagataacatcgaactcgcaccactccacccagacgacgttcaagtccacatggtggctagtgggatttgtcactcagacgaagcgcttcgtaaaggcgacgccattattggctatccaatcgtcctcggccacgaaggttccggaattattgaaaaagtcggttcaaacgttcaaagtttaaaagttggcgaccatgtcgttctctcattctacgcatgtggcatctgtgaaaactgtctcaaaggcgttccaacacaatgcctcaactacgcagaaaataacttatccggcgtgcgccctgatggtagttcccactttactgaaaatgaccatcacgttgccgatatgttcgatcaatcttcattcacaaccacaaccgttgtccgcgaacgaaatgcggttaaagtccctgacgatttagacttacgcaaactcggaccactcggttgtggatacgtgaccggtagtggcactgttttaaatactttaaaaccaaaacctggcgacacaatcgccgtcttcgggactggtgctgttggactcgcagccatgatggccggtaaaatttcgggttgtacgaaagtgatcgctgtcgatatcatcgacgaccggctcgcactcgctaaagaactcggtgcaaccgatacgattaacagtcgtcaaacagacgacgttgtcgcagcaatccaagccctcacaaatgggcgcggcgtgaacttctgtgtcgataccacggggattacaccagtcatggaagattcaattaaggcgctttgccaaggtggggtgtcagcaacaattgccgtaaccccaaaccacatcgatcttgatacttggaacgacttatgtgtcaacgacaaatccgtcgtcggcgtcaacatgggtgactccattccgcaaatcgacgtccctcgtttaatcgaattctaccgtcaaggcatgttcccctttgataaaaccgaaaaattttatcaattcgaagacatcaacactgccaacgaagcctctattaaaggtgaaacaatcaaacccgttttgattattgacccggactatcaattctaagcaatcaaaaagaccgcttattcagcggtcttttttaatttttctgacgccaataatggccaagtgttatcaacatcatcaagacgattattcctctgagtaaccaaagacccaatagcgcgccaaacacaatggtaactgcagacactaatggcttttggaaaataaacgcaaaccctaatataataatcaatactggcatgcagtccagctccttttctttttgaaaattgcatgttaaatttaaagcaatcatatgaagtgaggtgttagtagtgccagctattcccgataatctacttgccgcgaccatggggcgtaaactcgctacggttcgtcgtgcgcaaggcttgtcccaacatcaattagcccaggatatttgttcgcaaccgatgattagtcatattgaaaacggcacttatattccaaacgccattttgttagcaaaactctgcgaacggcttaatatgccgttagaacaagcgctgttaagtcattatcccgaaattgatcaacaacccgaattcaatcaacaaattaaacaactgtgcaatgcacacgattatcgcggtatgttagattatttggatgcgactggcttggccgaacaccttgaactggcgaccgatttacagacctactactactatcatggcatcgcagtattccaagaacttcatacaaccacggatagtttacgggaactacaaatggcactcgactatacgtttacaccgcgccaacaagttttaacgcctactgagattttgattctcagtagtatcagctttattaagagtacaccccatactaatcaaactgacttcgaacacgtcctcgcaattgtgaatgcagggcggttcacgcactatgacgagaacattaatatcttattctacctgtatagtctggcactctatcaagatcaccactttcaaaaagcttttgccatcgccaatcaaggaattgactggctcagcaatcatgattcacactacatgttagccgacttattcttgctagtcgcctgtacaataaaaaaagagctacgacaaaaaattgacttttgtcgtagctcttttttgaaattctatatggctcattctactgcgctaataattgtccaattcttgatttaaattcagttaagaaacgcggcgtatcaacttgtacacaaaccgccgtccgcgttgctggatcatctaggcgggcattatccccaattgttcgtccacgtgacgggccttctatctcagtcttcaagttcaatgggaaagtcgtgactaagctaggatcgattgcaacagcgactgctaagggatcatgtaaggcacagccgtgcaaatggggagaagtgacttcataggctttgatatagtaatcaaccatatcggcataagctttggctgctggtgtaccgagtgcgcgccattctgccgtatcggtgcgtgtaaaaagtgtgcgcaacgtgacatcaaggcccaccatcgttaccggcaaaccactcttaaagagtaagtccgccgcttcagggtcttgactgatattagcttcagcaaatggagacacattaccacaaactgttaaggcgccacccataatcacgatttgaccaactttcttcaaagttggtaaatctttttgaatcgctaacgctaaattcgtcatcgggccagttgccacgatgctcaagtcagccccatacgcctgacaagcacgtaatataaaatcaacggctgattcagttgccatttccggatggggctctgtcagatgaatctcaccaacgccgtcttgaccatgaatttccgcactaattggtaagacgctaaaatcatgcgtcgtcgtcgaatgcccagcccctaaataaactggaatgtctggatgacctaataaatgtaaaatttgttgactattcacaacgcttcgttcagtcaaaacgttgccgtattctgaggtaatcccgattaaatcgacttctgatgatcccaatgcataagcaattgctaacgcatcatcaatcccagtatctaaatccaaaatcattttttgtgccacgccaagccctcctcaataatcatgcaaaataatgtacaccacaagtgtaccccattatcggggacgggtaaattaataacctaaggattaaactcaaaaaagacaagtagattattctactcgcccttttcgatgattcagtttagaccattgatttcatgatgcattaaaatcgtttgaccatctgactgagtcttcttttggagccgatctaataacaacttagcagctgccaatccaatcgcttctgttggcggttgaatcgataggattggccactgtccaaattgatgttcatcggcataatcatagtgaccaaatagtaaatcttggccaatccgaataccattttctgataaataagtgagcgcaccaaaggccatattatcattgctgacaaataaagctgtaataccttcggctaataatgcttgggcaccgcggtacccgctagtccgagaatagtcaccttcaaaaacatgtaactgtctgtctggataagctgccatcgtctgtttagcacctgccagtcgttcacgggcaacataatcatcctgattagcggcaatcatcccaatattctggtgtccgaaatcaacaatttgttgcatcacttgtgccacacttacgcggtcatctaataaaatcgaattaacattgcgtagctgatttgggttattaatcgtcacaaccggaatatcaagtgccgctagtcgttccattccttgccattcttcacctgctaagaaaacaattaaaccatcaatcgaatgcgccattaaataatcaattttttgatcaattaacgctggttggtcactaaagccacttaataataaactatacccttgttgctcaacgcgttgttctattccagaaacaacttccgcgccaaatcgacttgaaatactattcatcaataaaccaattgaaaaactttgattgttcttcaatcctttagcgataatattttgtttgtaatcgagttgctcaatggccgctgcaatcttggcttgattagctgctttaagctgttgcccattcagataccgtgaaacagttccgactgagactccggccaattcagcgacttctctaacagatgacattcttattccccgcttatatcgataaagtgattttctccgctaaatcagcaaccataatagtcactgcttgtgcacgtttcacctgattatcaatatccatgtaattaagatcagcagcaggtagttcgaaagtaatgctcttttcttcacctggttggaaggcattcttttggaaagcttttaacagcttcgttcgttgaataactgctccaccagttaatttgacaaataataaactactttcttggcctacaaactgtccgttattttttactttaacagttacaactagtttgtcaaccatttgcttaaccgctaattgtcgataatcaaattggtcgtaactaagtccgtaaccaaatggatataacggttggccaacctcatcatagtaatcatcttgtttagcagcatcgcgttgatagtagtaaaccggtagttgctgggtattgcgcgggtaagacacactcaacttaccacttggattattaagtcccactaaagtttcagcaattgcgcggccaccttgttgaccaggaaaccaagcaatcaatacagcatctgcaagttcatttaccagtgttaaatcgtatggccggccttgcaccatgacacatgcaattggcttgcctagtgctttcaattgcttgagcagcacttcttgttggccccccagactaagtgatgcgacatcaacattttcaccagaatccatgttgatgccttttgaactcactgccccgttacttaggaaggccatatcaaaattacgtgcactggaaccacctaatacagggatgattaaatcggcatcgcgcgcaagctcaactactttggcaattgcctcttcttgatgaattgaattacgcacctcacagcctaatgcatacacgacttccgactcgggaaacatttcttgaatcgcttgataaattgtttgcgcttgacgcgctgaactttgtgctgctgtataatcccccaagagattatataattcatcagcattggggccaatcactgcaatcttttgcggcttattccggattggtaaaagcccattgttcttaacaagcgtcatgctttcacgtgccacttgcagattcagcgcatcagctttttcaagtaaggccgtcaattgcgcattcggggcttgtacatagggttgttcaaacagacccaacaggaatttcaacgctagtactcggccagcagcattatctaaggcagcttcgtctactaggccattttcaatggcttgatcaagcgttaggaatgtctgatcccataaacttagatcgacacctgcatttaaggctgccgccgcagcttctggttgtgtttcaaagattcctgataaccgatcaagcgcaacaccatctgccatcacaatcccttgaaacccatttacatcccgtaaatcttgagtcaacaacggctgattgatatgacacggtaccccatccacatcgttataagcagccatcacacctgccgcattcttgacactactcaaaaggggttcatagacgtctgaaaattcacgttggccaattgtgacggtgcctgaattatggccacccaatgcttcaccttgcgcaatacagtgtttcaatacaacaccaatggcatcagtcgttcgcggtttagcaggttggtctaagaaagcaacatcactttgaattaaatccccttgaaaacccgccacaacggcttcactcattcgcgccgctaaaatgggatcttcaccaaaacattcttctgaacggccccaacgtggatctttgaccaaatcaagcgtcgaaacaagcgctaggttaacgcctttaagcactagttcttgtgccatcaaatgcgatgattgctgcattaaccgcgtattaaacatattgccgcggccaatattagttggatacgagattccttcaagcccttgatggccatgaggacattcttcaacaattaatgctggaatcccccagcgtgaatgcgccatgacatattcttgaacttcattagcaactcgctaactatcctgtgcacgaacgccattttcaaagttcacttttgaccatggatctgcgcgaaataaaccataaagtgcaccgacaccgccgccccattcaacatgcgccttgaatttttctgtaaacgttaatgactgagaatcttcgaaagtttcccatccataaagatgttgattcacttgaccaattttttcctgcgtactcatgcgtgaaagtaaatcagtgacccgctcacgaatggtcagcgctgcgtcttgatatggatactgcatttcaaaaacctcattcctcagttaatattttgttacttgcaatgacaaatggtaagaataaaaagacatctaaaccaattaataagatggttaaaatcgctgctcggtaatcaccgccagttgccaagaaagattgaataacaggcggtgtaatccatggtgcagccgctaccgttttactaatcaaacctaagcttgttgcaaaataagcaatcactaaattgattgatggaataatggcacatggaatcatgaagattgggttcataacaactggtaacccgaacataacaggttctgtaatattgaagaaacaagttgttaaccctaatttagcaacttgccgttgatctttccgccgtgaagcccataagatggcaatcactaacggtaagatacaaccgcccccaccaatcaagccgaacgcatttgtaaaaggttctgtaataatatttggaatcgcatgtcctgctgaaaaggccgccatattttcttgaatggcttgtagcaatggtgcttggcgaactggtgctaaaatgctagaaccaagcatcccaaagacccataagaaatctgagaagaattgtaagaataacgtacctggtacagataatacaaacgattttagtggcgtttgaatcgcaaggtcaattaattgagggacgttcaacccggttgtcacatttaaaataaatacaaaaatagcaaaaatcaaaataaccgagacttctgggaccaatgaattaaacgaggttgcaactgctggtggcacgccttctggcatcttgattcgtattttttcaaactttgtaaaacgaatgaataactccgtactaatcaatgctgctaacatcgctgttgcaagtcctgatgacgaggttaaactttgcaagaaaacacctgttgcttccgccgttttcccatttgctaaagtgacggtactcgtcacaggcatcaaaataaacattgttaccaaacttaaaataccagcatgaactgcactaaatgcaggatcgttcacttttccagagcgaacataatgcgttgctaaattagcaccgatgttataacagaccacaattgataaaatactcatcgtcccattattcacaattgttgctaggtcagctaatccgcttaaatcaacaatcttttgaacagcggcgtttgagaaaattagcgcatttaataaaaccataagcgaggccgccataacaagtggcattgtcacaatgaagctatcccgaattgcaattagatgccgctgattattggtttagaaataaacggcaacatcttttctgacagtttatctacgaatttcacagtcatttctccctttattgaatataattgaaccggttcaatttcatataatagcacgcgattatcattttgacaatagcgcttacaaatatagcctaaaaaagattgagtccccctcatgaacaactcaatctttaaaccattgacaaaggccacctattcctaggtggccttctaattaatttcgcatattaaattcttacataatgtcaggtagccagtcactaattggctacgcacactagcatcgaatggctagtggagatgacgtgtgattcacgtcgcttttatttttgggttaattcaattatgtctaaattcttgtgtttctaaatatcttctcgtttaaacagcgtaagccgcctctttacactacttgtaactccatggttactccagttgattaaagtcttcaaataatacttgatactacagtgataagtgctgattaactttcctaagtataccatattttcagttcgaacacaaaatgaccataatctttctgaaaagaggctttctatttgaccaaaattgacctttgctgtaaaattcaatttatagactacagagtgattctactctggcttatataaggaggcaattcaatgttagtaccgacagttatcgaacaaacatctcgtggcgaacgtgcttacgatatttactctcgtttactaaaagaccggattatcatgttatctggtgaagtgaacgaccaaatggctaacacaatcattgcgcaattattattcttggacgcgcaagattcagataaggacatctcaatctacattaactcacctggtggttctgtgaccgcagggttagccatcatggatacgatgaacttcatcaagtctgatgtccaaacaatcgcaatggggatggctgcttctatggccagtgttttactttcagctgggacaaagggcaaacgttttgcattgcctaactcaactgtcttgattcaccaacctttaggtggtgcacaaggccaacaaactgaaattgaaatcgcagcgcgcgaaattttgaagactcggaaacgtttaaaccaaattttggcagacaactcaggccaaaccttcgaaaaattacaagctgacactgatcgtgataactacatgacagcgcaagaagcaaaagattacggtttgattgacgatattatggtcaaccaaccaaaatagagtagataataaaccggttctcttctgaggattagtaaaaaaaagggctagatcaagttgatctagccctttttttataccaaatttgttatactggcagtatcttaaaggagggtcttccatggatattagtgtgattaaaagcgagaatgtgacaaccaccggcggtattacaattggtcagccagatgcaccattaacatcaattgaatttatcaacgtcgcttgtccctattgccgcaagtggtttttaaaatccgaagaaacgatgactgaagcagtcaaagctggtcggctaaaacgtattatcaaaccttttgataaggataaagaggatctacaactggggaatttagcccatacctatttaccttttgatcaacccgaaatagtgctgcaaacactatcattcttgtttacgcatcaaaaaacatggcgtaatgatctgacaccagatgaatttaaaaaatacatcgatcaaaatctcaaattaacgccacaagataatgcagaaaatttaaccgcaattattgctgaagccaatcgtgccaatattaaattcgtcccgaccatcattcttggtgaccatatctttgatgaatcaattgacatgactgacttaagtcaactactaaaataaaaaacaggtgtcccccctcggggcacctgtttttgtatgtacgataaagggttccaaaaaattcaatgtaccatcaaatcttttggaaccctttatccgtcattttatgaaaaacgtgcattatccatttgaatcgcattcaaatgatgttcaacttcattcatttcttgacgtaattcatgatacttatcgcttgagaaatcgagatagtttgtgcaagcaccaacccgttcgtagatttcttctttttgactttctgctttttcagttaaggtaacgtcaactcggcgttcatcgtctgatgcacgattccggcttacccaaccatcagcttctaaccgtttcaaaagcggtgttagtgtcccactatcaagttctaaatggtgccctaattctttcactgacatcttgccatgttcccacaatgcaagcattgcgatgaattgtggatatgttaatccgtaaggttttaataccttaccgtagaagtgattgtaagccttttgtgcgcggtaaatcgaaaaacagagttgttcatctaataatactggtttaaccatataattttcctccataaaatgtccttcagttattgtacttaattatattgtacaagtcaaatattgtgcactacctatttattttgtcccttatccattcccctgttggtgggcttcggcaagttgattcaattttctgagccggtgattaatccccgacttcgaaattgccccactcggcattttttccccaagttccttcaacgtaatatctggaaattccaaacggagtagcgcaatctcacgcaacttcgccggtaaattatctaatccaacggtgtcgcgcaagtattcgatattttcaatttgttttgtagcagcatcaattgtcttattcatatttgcggtttcacaattgactaagcgattaaccgaattacgcatatcccgcacaatccgaatgtcttcaaacttcaacatcgcgttggtagcaccaatcacttgtagaaaatcagcaattttttcagcctctttcagataagtgatgtacccactccgtcggaaagtcgttttggcatttaagccaaaacgattcatcatgcgcgcaatatcttgattatgctcttcgtacaatgaatagatttccaaatggtaccggcttgtttcaggattattcactgagccaccagctagaaaagcgccccgcaaataagaacggacgcgctgatcttcattaatgacatcttctgacacctttgtatgaatggtaaaaccgtcctcctcaacaatatcaaggtcttttaaaacggtattggtatcatactttaagcgcacgatgtattgattattcttttttaacttcattttgcgacgtactagtaattcggattcaacttgataattttgtttcaataaactataaatccggcgagcaatcgccggattctcagtttgaacgtttaaaacaaattggtgattcatcaagctcagtgacccattcatccgaattaaagcggctaattccgctcgtgcatgttcaggatgcacttcaagttgcgtcagttctttcttcacttcacttgcatatgaggccacgattattcacctcgcttagctgtattgacctggaaagcaagattcataatttcactcgctactttttgtccattatggaacacaccatgatctttcaacttcaaaaagttatcggaaatcactcgacaacccaatcctcgtaagccatcaaagtcatgttcaaccggccagagaatttcgtcgtacttttgatgatccaaatagttttcagggacttgtgcggtattaaccaaaaccgtgtccacgaagttctgaccaagatgatcattcaacacgcggacgtgatcggcatcggtaaagtgttccgtttcccctttttgcgtcatgatattacaaatgtaaatcacttccgccttagtttgcttgactgccgcacctaagtttttaatcattagattcggtaaaatactggtaaacaaactgccgggtcctaagacaaccacatcggcagccaaaatcgcatcaaccacttgttgaacggcttcgggtgctacagtatcatcttgatccgtttttgagacccaaacacgcttaatctgcttgcgtgctgcagtaatctcagattcccctgttaactgggtgccgtctttaaattcagcattcaacgacagcgcaacattggccgcaggataaatatgaccgtcaaccgccatcatttctgataaccgttgaacagcatcaaaaatacctgattccatttcagataacgccgcaataattaaattaccaatcgcatgccctgagaaaaaggcatcgtgtgatttaaagcggtactggaaaatatcgagcgttaactgtggtaaatctgacaaggcgactaatacattccgaatatcaccaggtggtaccacgttaatgtaatcgcgaataacgccggatgaaccgccatcgtcggcaaccgtgacaattgccgtagcatccgcattctgttcacggagactctttaagataacgggtagtccagtgccgccaccaatcacaacgacttttggtcgtcgccctttaatgacccggataatccgattagtagctgtcatgaccggttaaccgtttccttgcgtttcttcatatcccggtgggtcacgtcaaccggataatcgaacgataaatcatcagccaatcgttgggcaagcgctactgaacggtgttgcccgccggtacagccaatcgcaattgtcacacttgttttgccttccttgagataacctggcatgatgtcttttaacagcccactaaattgttcgtagaacttttcagtcgctggctgcgccattacatagtctctaaccggttggtctaaaccgtttaattccttaaatgctggcacatagtatgggttcggtaagaaacggacatccatgacgatatccgcatcaattggtaaaccgtatttaaacccaaatgacatcacttcaatatggaatgacggattatctgacgtcttgaagacatgaaaaatcttttctcttaattgtcgtggtgacatggttgaagtatccaccaccatctgtgctcgattgcgaatttcagttaacaggcgccgttctttttgaataccgtccattaaacgcccctccatcgctagtgggtgggaacggcgtgtttccttgtatcgcgaaaccaattcctcatctgatgcatccaagaagagaatcttagtcgtcacgaattgggtattatcaaggttagcaagcatttcaatgatctcatcgtaaaaagcacgtgagcgcaaatcaatcactaatgcaatcttagtcactttgccggactccttaaccaattcccaaaacttaggtagcaatgtcggtggcatattgtcgacacaaaaataacctagatcttcaaaactttgcatggcaacggttttcccggcaccactcatccctgtaatcactactaagttcaatgtatctgtcatcagaccaccccttaagttttcgcttttatcattgtaacattcctggtgtgtcattgaaagctgtcgaaactctcgacacgtgttatttaatgctattaaaccgagttcattcctaatgtctaggcatttgaaagagcttattttttccataaaaaaaattgcagaacaatcaaattgttccgcaatcattaaatttagagactataaacgtcttgcaaatgcgatgatgatggcattaatcccaaagaaagcaaagtaaaaaccaactagggtcaccatcgttacggcagtcaccactggatccattaacaataagatcccaacgattacgcctaagatattcagaatcatcgaaacgatgtataggcctgtgctaaattgcttgagatggccgacattcaataatgccacaattgaatcgaacaagaaccagaatgcaaagatataacctaaagcagccactccagctggaatattcaagataaacaaaattcccaaaatgacatcgacaatggcatcgaccaacattaacgttgcgcgcatccctgtctcttgacgtaaccgattatatgcactgattttggcaattccccgaataatcgccgcaatcgcaatcacgattaccaaaccagataatgtcttacctggttgattaaacaagcaatatgcaacgattaagaaaataatccccgtcataaattctgaccaatcaaagtgccattcattttttctaaacattcccaatcacctctcgttgttaatacctttatgatactttttttacggacaatctacaactaaatttgacaaaacaaaaagtgggcggttaagacagcaatcattctgtcttaaccgcccgctttttaaacacattctatcaaccatcttctggttaatcctgagcggcaattgtgtgtgctgtatcgcgttctaaaacaggttttaaatattggcctgtatagctttcactgacgttggcaatttcttctggcgtaccggtcgcgacaattgtcccgcctttatcgccgccttctggtcctaagtcaatgatgtgatcggcagtcttaataacatctaagttatgttcaatcactaagatcgtgttaccttcttcaactaaccgttccaaaacgcccaacaagcgcttgatatcgtcggtatgcaagccagtcgttggttcatcgaggatgtataaattcttacccgttgattgtttctgtaattcagaggccaacttcatccgttgggcttctccacccgataaggttgtggcagactggcccaatgtgacgtagcctaagccgacatccacaatcgtttgtaacttgcgggcaatcttgggaatgtttgcgaagaagactgcggcttcaccgaccgtcatgtctaagatttcggcaatgttcttgcccttatagacgacttccaaggtttctgaattatagcgactgccatgacagacttcacacggcacatacacgtctggtaagaaattcatttcaatcttgataatgccgtcacccttgcaggcttcacagcggccacctttaacgttaaaactaaaacggccttttttataaccgcgtagtttggcttcattggtttgcgcaaacaaatcacgaatattgtcaaagacgccggtgtacgttgctggattactccgcggtgtccgaccaattggactttgatcaatattaatcagtttttcaagattctgataacctgtaattgttttatattgacctggttttgctgagttacggttcatcttttgtgccaaagcttttttcaaaatcgtattgactaaggttgacttgcctgaacctgaaacaccagtaaccgcgacaaattcacctaatgggaaatcaaccgtcagattcttcaagttattttcagccgcaccggtcacgcgaatcttcttgccattgccttgacgccgttctagcggtactggaatatattcggaaccggctaaataacggcccgtcaatgatttcggattatgttcgacttcagttggggtcccagcggccatcacttcaccaccgagttcaccagcgccgggcccgatatcgatcaggtaatcagccgcgcgcattgtatcttcatcatgttcaacaacaattaatgtattgcctaagtcgcgcatcttcttcagtgacccgatcaaacggtcattatcacgttgatgcaaaccaattgacggttcatcgaggatgtagagcacgccagataagttcgaaccaatttgcgtggctaaacgaatccgttgggcttccccaccagaaagggtcccggctgaccgactgagcgttaaataatccagaccgacgttaatcaagaaagttaaccgatcatgcacttctttcaagattggtttggcaaccacactgtctttttcagaaagttcaagttgatcgaagaatggtaaagcttctttgatggcgttgtctgaaacggcagcgatatcttggccgcccactttaacagccaaagcttgtcgatttaaacgagcaccatgacaggtttgacacgttaattcagtcatatacgtccgcatttgcgtccgtgtgaaatcactattggtttcacgataacggcggtcaatattggctaatacaccttcaaacggcacgtccacatcacgcacaccaccgaaatcattttcataatggaagtggaagttcttaccctgagaaccatttaagataatgtctttttggcgtggtgttaatttgctaaatggtcgatccatgttaattttaaatgacttgcaagcttgttcgagcatctgtggataatattgagagctaattggattccaaggcgcaatggctccttcgcgcaatgtcttgctggtatcaggaatcactaaatccatatcgacttctagcttaacccctaaaccatcacagtctgggcaggccccaaacggtgcgttgaacgagaacaagcggggttctaacgcgcccaccgtaaagccacagattgggcaggcatagtgttctgagaaaagtagttgttcgccaccgatgatatcggcagtcgcatacccttctgataagcgcagagccgcttcgaacgagtcaaataaacgggaccggacaccgtctttgacgacgattcgatccaccacgatattaatgtcgtgttttttattcttatccaattcgatatcggcactaacgtccatgacttcactatcgacttgaacacggacatagccttctcgttggattttttcaaatacttttttatgttgcccttttttgccacgaataatcggtgacatcacctggagtttcgtcttctcaggtaacgctaagacacgatcaaccatttgttcaacggattgactactaatttcagtcccatcgttcggacagattggatgaccgacccgcgcccataaaagccggagataatcattaatttccgtgactgtcccgactgtcgaacgcggatttttagacgttgttttttggtcgatcgaaatcgcaggactgagcccatcaattgaatcaacatctggtttatccatctggcctaagaattggcgcgcataagccgataaactctcgacgtagcgccgttgtccttcggcatataatgtatcaaacgctaacgaactcttcccagagcccgacaatcccgtcacaaccaccagtttatcccgtggaattgtaacatcaatatcttttaaattatgcgctcttgcgccatgaatgacgatcttatcatttgccatgctttacctcttttaatcaatttcactcttaatctctaagatggtatcccgtaacgtagctgcctgttcgaagtccagtttcttggccgcattccgcatttgttcagataaccgttctaccatttctagtttttcagctttcgacatactatcgaaatcaatctcgttggtcatcttgacttcttcagggtgttcgactgattgaacaaccgaaatcgcatcccgaactggtttgataatcgtcttcggcgtcatgtgatgtgcttcgttgtaggcttcttgaatcgaacgccgccgcttggtttcatccattgcattgcgcatcgaatcggtaatcttatcggcatacaaaaggacttgcccgttttgattccgagaagcacggccgattgtttgaatcaatgagcgctcgctccgcaagaaaccttctttatcggcatccaaaatcgccactaacgagacttcagggacgtcaatcccttcccgcaacaagttaatcccaattaagacgtcaaacttaccaagccgtaaatcacggataatttccgttcgttccaaagtcttgatatcactatgcaagtaacggactttaatccccagttctttgagatagtcagttaaatcttccgccatcttcttggttaacgttgtaataaagacgcgttcgttcttttcaatccgatcattaatttcgccgaccaaatcatcaatctggcccataatcggccggacctcaatattcggatctaacaagccagttggtcgaataatctgatcgacctgaatatcggtttgttcagcttcataagggcctggagtcgcagaaacgtacatgatttcattgacgtgttcttcgaattcaggtagcgtcaaaggccgattatcaagcgcacttggtaatcggaacccataatcgattaacatttgcttccgggcacgatccccgttatacatcccgcgaatttgcggcatcgttacatgggattcatcaatcatcatgattgaatctttcgggaagaaatcgagcaacgtataaggtggttcccccgccgcacgatcctccatgtgccgtgaatagttttcgatccccgagcaatagcccatttcttgcatcatctcaagatcgtaattcgttcgttgttccaaacgttgggcttccaacaacttgccgtccgccttcaattccgttagtcggccttctaattcagccttgatactcttaatggctttttccatcttttcttcactagtcatgaaatgcgttgctgggaaaatcgcaacatgttcgcgttcaccaatgacttcaccggttagcgcgtcaacttcaacgattcgatcaatctcatcgccgaagaattcaacccgcaacgcatgatcatcacgtgaagccgggaaaatctcgaccacgtcaccacggacgcggaaacggccccgttggaaatcaatgtcgttccgttcaaattgaatatccaccaattgacgcaataagtcattgcgctcaatctccatccctggccgtaacgaaaggacgtgatcttgatattcattcggatcacctaagccgaaaatacatgaaaccgacgcaaccacaatcacatcgttgcgttccaacagcgcactggttgctgaatgccgtagtttgtcgatttcgtcgttaatactcgaatctttttcgatgtaggtatcacttgaaggcacataagcttctggttggtaataatcgtagtaactgacaaaatattctaccgcgttattcgggaaaaattgcttaaactcggcatagagctggcctgccaaagtcttattatgcgaaatgatcaatgttggtttgtttaaattcttgatgacgttcgacatcgtaaaggtcttcccggtcccagtcgcccccatcaagacttgtgcttttgcacccgcctcgaagttcttagttaacgtttcaattgccgctggttggtccccagctggttcatagggcgccactaaatcaaattggttatcattctgtcgttcaatcatcaaaagcctccattaccatttgctagcgataaaagaagacgccgggtagaagttgccctccaccataacgtctacttaccgattttataaagaataatattccttgtcctttaagtcattcactattctaccacaccgaacatactttcgccagagtgctgattaaagagtgcgtcattaagcggttatcctttgaggattagcctaaccagacggattagcgacgcagtcgatgatgcggctggtgtagctaaccggaaaaggatgcttaatgaaagcacgtttcaactaaagtgtggaaacgtgctgttgtcagtagattcctgcgctttgctacacttgtcaaatcgccgcttatagcgtcaattcgccaagttaggcaaatgctctgaatctgagcgactgacaacagcactctattccgctagcgtctgtctcactaattgggttagcttccctcgatctgcgaagtcttcactcagtaaatctggcaagatttcttggatgaaataacgggcgcatgcgagattttggtattgcataatcgtttttaaactttccgcaaaaatttctagaaaagcattctcaggattacctttttcaatttcaccaaaagactcgtagagtaaatcaatcttatcggcaacggctaataattgcccttccaaagtttcatcttttccttcactcaaacgacgttgataccgttcttgtaagaaatctggaatttcatttttaatgaagttagcggttaatgaactttcgacattggccaacatcgtccgcaattcatgcgttgcgtatttgaccggcgtcttaatatcgccgataaaccgttccgtataatcgtggttcagtgcgcgttcgtacagcacttgccaattaatcgtttgcccattttcttcttcaatatcgcctaataattgtgcaatttctgctactttaaaggagtgcgctgcaacggaatgttcttgatatttaaacaatcctggtgcgcgatttagtgtctccaaattattcaaaccttgcaaatattgatgcatacccataccaaactacctcccttttcttacaaaaatagaccgactaacgcagtagtccgtctatttactgttctttattataggtaagttatcctgaaatgtaaaacagaagccctatctattttacaagttcatgaattgctttttcgaagtttgctaacttcaaatcagctgttgcggcatcatcagcggatgtccccacatagaatttcacttttggttcagtcccacttgggcgaatcgcaatccaagtgccatcttctaagtgatatttcagaacattagatgttggtaaattgatgggttcagtatgaccgtccgcaaaagtttctgtttgtgtttggaagtcttctgctgaagcgactttgatgccggcaaattcaactgggctttcttcacgacatttaaccatcaagtcagccatttgttgtgggccattgaccccttcgaaatcaactgcagtcgtttgttcagcgaagtagccgtattccgcatataattcttgaatgccatcatacaaagtcttaccgtttgacttgtaataagctgcaacttccgctaataagaccaatgtttgaatcgcatctttatcgcgaacgaatggtttcactaagtagccatagctttcttcgaaaccaaacatgaaggtgttttcgtctgtgtcttcaaagtgttgaatttgttcagcgataaatttgaagccggttaagacatcaatcatcttcacattgtagctcgctgcaatcttcgttgccaattctgttgacacgattgacttaacagccgctgcattggctggtaatgtgccagcatctttactagcttgtaaaatataacgtaataaaacagaagcgatttggttcccagtcatcaattggtaactcccgtctggttgacgcacagcggcgcccaaacggtcagcatctggatcagtcgcaatcaacaagtcagcttgttgtgctttcccgagctcaatcgccatatcgaatgtttgtgggaattctggattagggaatggtgtcgttgcaaattctggatcagcaactgcttgttcagcgaccattgtaaattgttcaaagcctgcttgacgcaatgcgcgttcaccaagtactttcccggtcccatgaagtggggtgtaaatcaatgacatggtcttgccgactgtgtcgaccaattcttgattaatcgtgacttgcttaacttcagctaagtaagcttgatccacattttcgccaatcaaagtcattaagccggcttcgcgcaatgtgctttcatcagccacttcaatcgcaaataaatcggttactttgcgaatataacttgtgattaaatcggattccttaggtggcatttgcgcgccgtctttgccataaatcttgtaaccattgtattgtttaggattatgacttgctgtaatcatgataccggcataggtatgtaagtgccgtacggtaaatgataattcaggtgttgggcgtaaggcatcaaaaacaaacgttgggatttgatgttgacctaagacccgcgctgcttcgtgcgcaaatgtttcagattgataacgtgaatcaaaactgatagccacaccgcgttttttagtcgcttctggtaatgttttcatgaattgagcgaggccttctgtggcttgacgcaccgtataaatgttcatgcagttgatcccagggcctaaaataccgcgcatcccagctgtcccaaattccattggaacgctaaatgctttttctaatgcatcatggtcgtttgccatttcgttaagtgctttttttaaaggtaaatccatttctgtttgattattccaaattgcataattatcttgccagctcattgtgtaacccccgcattttagtctaaaagctagttctaagtataccataatcaaccgctttcctaaagcatcggttgtacggtaatgcgcaccaagctaattgtctgggtcgattatttaataatgcttgtccttctaaaaattaaaattttttccaaaataaaaaacggccgactaaaatttagtcgaccgctagaaatgtgcgtcataagccacatttttaggttaatcctcaaaaataaaatcgtttcgaacgcactctaatcgtgcttcctcgaactgtcttttctggttaaccctgaatgtcaaacgattgctaccgcaatccttcgccattctgtgttaatcctcggaagctaaccggctgccgtcgcactctagatactttgtaagtatttaaatacttcttggcctgctatgccgccgtcgccaactgctgttgtaatttgacgaagatctttttcacgaacgtcaccaattgcgtagatacctggaacactggttgccatgtggtcatccgttttaatccaaccggcatccgttagaatccctagatcaccaaaggcactagtcattggttcaatccctacatagatgaagaccccacttgcagcaacttctttggtttcaccagttgccttatcaatataagtgacaccggttaccttcttgtcgtcaccttcaatagttgtcacttgtgcattccagatgaagtccatcttgtcattagcaaatgcacgatcttgtaaaatcttttgagcgcgtagttcatcacgacgatgaatgactgtcaccttgctggctaattgcgtcaagtagaggccttcttcaatcgctgaatcgcccccaccaatgaccacgacttctttattcttaaagaaggcaccatcacagaccgcacagtatgagacaccacgaccgccgaattcatcttcaccggggatcccaatcttcttgtgttctgaacccgttgcaatgatgattgaacgcgcttcgaaatcgccttcgtcagtgtgcacaatcttcatctcgccttgcagttcaatcgagttgaccgtaccatagccgtattcagcaccaaattgagtggcgctagcatacatcttttcgcctagttcaggaccaaggattgatttaaagccgggataattttcgacctctgctgtattattcatttggcccccgtaaattccgcggtccaacatcaatacagataaattcgcacgtgaggcgtataaagcagccgtcatcccaccaggtccagcgccaatcacaattacatcataacttttagccatgtctattatccccttacttttaaaaagtgctcgttcttcatagaatgtatcttacccgttatgtaaaaaaaagtctaccaaactgttttaccagtttgatggacttgttggtttcaattcttgtaataattcagtggcttcggcatcgaaatccgaatcgtcactctgtaaataagcagtcgctaattcatagctagcctgcgtctgatttaaaaaggcatacgccgttgctaaaaaatattgtaactcaggatgactctgatagttggcggttggaatttcttccagaacggtcgccgcaccatgatagtcgccaaccgattccaaacaaatcgctaattggcacaccacaaagatgtaatcatctttggtcttagccagcgactttgcccgttgtaaacacgttaatgcgcgcgtgtactgaaatcgttcaaacgcctgcatccctctgtcaaaataaaactcacaagttggtcttacagataccaaatcgcccataaagtaatcggttctcctttagcctttttctcaacgctaatcatcataacacactctgatgatgggtgcgatacccattcaaaatgatgccgctttattcgttaaaaagttttagacttcatcaaaatcgatttcaggtttacctgaacgccgcattaaatacgcaatttcagtcttaatatcacaatcttcatacaatacattatagatggcccgtgtgattggcatatcaacagaacgttgttgagccaattcataggctgctttacatgttgcgaccccttcgacgaccatccccatattggctagcacatcagctaatttttgacctttaccaagtgcatttcccgcacgccagtttcttgagtgaacactggtcccagtcacgattaaatccccaacaccggataatccgataaaggttaatgggttagcccccatggcaacgcctaagcgggaaatttcagctaagccacgcgtcatcaaggcggccttcgtattatctccataaccaagcccgtttaaagcacccgcgccaagtgcaatgacgtttttcaaagcagctcccatctcaacaccaaccacatcagggttggtatataagcggaaataatcattcatgaaaatctcttggatccattgggcttgaatcaagtcacttgatgcggcagttaaggtagtaatatctttttgtgcgacatcttcagcatgactaggacccgataaaacaacaatcccattgcggttggtttctggaatggcttctgtcaagacttctgaaatccgtttgtgcgtgccttgttcaagcccttttgaagccgtcacaatcacgggtttcacttttttcgcaatcatcacaggaacaatctgttccgccaccgcacgaatcgcttgtgttggaattacaaacaagacaacatcaacttggtcaagtgcaacgttaagatcaatcgttgcgtgtaactggggatcaattttaaaatctggtaaataatgtgtattggtatgctgttcatttatttcagcgacttttttaggatcattgccccacaactcaacttggtggccattttccactaataagtttgctaagatggtcccccatgaaccggcccctaaaactgcaatttttactgtcatctgataattctccttttaaacaaatccctatttctgttcttttgcttgattgccggttaaataatccggtaactgactgtgcttacgccgccaaatccaaagaccaattgcaccaaagaataagacgagtgagacaatctgcgatacccgcaatggaccgatgaataaactatcagtccgcatgccttcaatgaagaaccggccaaacgaataccaaattaaatagctaaataagatttcgccttgtttaaaccaaccagttcgatggcgaatgctcatgatgctaataaaccctaatacattccatgctgattcatataagaatgtcggctgacgatacgcaccatcaattaacatctgttggatcacccaatcaggtaagtgtaacgattggagaaagtgcaatgttgttggcgccccataggcttcttggttcataaagttgccccaacgtccgattgcttgtgcgatcatcacggttggtgccgcaatatccaacactaaccaaggcgatagtgcatgacgccgacaatagataatgaacacaatggcagctgcaatcagtccaccgtaaatcgcgatcccgccgtgccaaatctgaataatttcgccgggattggcttggtaatacgaccattcaaaaacgacgtaatacagtcgggccccaattaaggcaaatggtaatgcccataaaattaaatttaaaatatcatcttcactgacattgcgccgtttagcttcctgtaatgccaatccaacggctaaaacgaccccagttgcgataatcacaccataccagtggatctccaatgcgcccaatcgtaatgcaatcggatttaatgcgcctaatagtagattcaaattattcgctccttttgtaaatgtgctttcatcaaaacgtacttttcaagctaactttctgcgcttagcgtcgtgaagcaaacaatcgactgcgtcgcttatcgcttcactgtgctaatacgcaaaagttggacaagcttgaatgcactcttatccgaaacgtgctccgtaagccatatccttccggttacccctgaatgtcaaacgattactgacgcaatccttcgccattctgtgttaaacctcaggatatacccggcttactgcgcactctaaaaaagactagtttgcatactgtctttctaacagtatagctcaaactagtcattagacctaccatatttaacgaacttttctgacttttaactattcttcttcatctgaattggcttcaattaacttgcctagattggcttcgaaggtcttcgttgcatcatagcccattgatttagcccggaagttcattgccgccacttcaataatgatggccaagttccgcccgactttaacgggcacggtaatcttcggtacagggacgtcgaaaatcatttgttcttcggtatctgaacctaagcgatcgtatttcttatcctgtgaccaattttgcaagtggacaattaacgaaattgacgtttcagcccgcaccgcaccagcaccaaagaggttcatcacatcgataatcccgatgcctcgaatttcaagtaagtgacgcaaaattgcaggtgcttcaccgaccacagtttgttcatcttgttgataaacgtcgacccgatcatcagcaatcaaccgatgcccccgtttgactaattccaatgccgtttcgctcttcccaacacctgaatcgccggtaattaaaacacctaaaccgtaaatatcgactaacacaccatgcattgagcgccgttcagctagcttcccttccaaataatcggttactaaactcgacaaacgcgttgtcgataaattcgaccccaacacgggaatccccgcttcttcagctgctttaagcatttccattggcggttctaattggcgcgagaccaagaaacagggcgtatcttcagaagccatccgacgcataatcattaaccgttcttctggtgtcatattttgcgtaaatgaaacttccgtccgtccaaataattgcacccgctcgtaagggtagtaattaaagtagcccgttaattcgagtcctggacgggaaatatcactcaccgtcactgctttattttttaaatatgcttcaccggcataaacttgtaattttaaatcggtgactagtttttgaattgaaacactatcagccatgagttacccgtccttcattttcacttatatcctctatcatattgcttttaaggtgatttttcaactttaatgtaggcgttttcttatctaaacaaaaaaacgggcccaatgtcaatcttaattgacgtcagtcccgctaactttttaataacgctctctcacaaattgatttgtaataatcgtattggcaattgataaaatgattgccacgatcacggctgctccaaaacttgtaaagctaaagtgggcgccgacgaaaacagcggtcaattctaacataatcccgttaatcacgacactaaacaaaccgaatgttaaaaacgtaattggaaatgagagtaagctcaacaatggtttaataaagatgtttaaaatcgataacacaatgctggcgactaacgcgatccaaatgttttcaacataaaacaagtttggtaatagaccagaaatcgcgatgaataacagcgtatcaacaattacgcgtgtccaataacgcattagaaatcactccagtcgtcatcgtctactttgacatcccgggcttccttgcgttgacggctaccttgatgtgctgtttcttgataagaatagtcttggtagtcatggcgccagtctgcatgccgaggacgtctacttggaccaacaattgcccgatagatgaagctgacaattaacccaatcacaatcagtggtagcgcaaattttaataataacagtagcgagccaatcacgagactaaacacgccaactgccgccataatggcgataatgactaataaaatcattaaaaaaggcattaaaactcactccattcactttcagaatcatgtttactctgacgtggccgttctggaatcaccatcactaagatgatgtagaccacaatcccagggaacgctgctgaaaacattgagaatacaacatatagaattcgaactaatgtcgcatcaatattaaaatactcagcaatcccgcccattacaccagaaatcattttgttatctcttgatttataaagtcttttccccattgttaaaacccaccattccttaattttttagttatcgttgtctttcaataaaatattaccagttgtcgtgcttaatgttaaacgagctgcctgttcattgtcgttacggccaagttgtaacatttgattccccgtactttgccgttgttcgatggtttgggtgtttgcaagccgatttttaatcatcccaaaacgcgtgcgggcatcaacagtcattgccaaagtttgtggtaaagctgtcttgattgtgccattcacagattttgcttttagatgttgtaaatcagttgtcgtcaaagtgttcttgatatccccgttgaccgttgaaacactcgcatttaaaacttgcgcttgaatcaataggttaccgttgacggttgttgcgagtaaatcatcgtaacggccttgatcaaaggtaatgccaccgttgacgttttcagcttccaccattgcagcgttggtgctgattaacgttaattcaccgttagtcgtcttcaagtaaatatcccggccggtaaagccatctaattcaacatccccgttcaataacttcacattcgtttgtaagtagttattggctggtaagtagaacgttaagtccgcttgaatccgtttattcggcacttggaagaccaagtcggcatcagtcacatcaattgtactgcgcgcttcaaaagcagccaatggtgttgcttctgccattttaccatataacttcacttgcgctgcgactttgacttctggacgatcccagatttggaaatgtacactaccgttagccactttgacgttaatcatttctggtgttacgtcagaataaacgaattcatggctgaacttttcagttgccaaaccaggcaccttaaagtttacttctttccaatccacattatccatgactgttttggcagtattcttcacgaacttaccaaagtgtgtgctagcttcgcctaacttatcgctcaattcatcaaatgtttcactggcattttctttccagtcatctgataagcctaatttttctgaccattgatttttggtcatttggcggcgttctttttcgatttggttgagttcatccgtcagtgcttcgcgtttggcttccaactcgtcgacttcagcttgcttttgtaataagccagccttgagtgtttgccgttcggttgctttttcactgcttaaactatctaaatcttccatcgtatcaaggacagtgacttgttcttgatcagcgtgcattgcttgcttcaaatcttgcaactgccggttaacgccggaaaggttaacggttaattcgtgtgccttttcttcaattgcgcttttatcagcggttggttgttcagtttgctccgttgctgtttcagttggatttgattttacatcttggtcatttttggctaaattttctaataagactaatgcttcttctgaagttaaaataccttggttcactaagtctaaaattcgttgacgttcattcattgttttgacctccattgatcattcgttgtactgtttcacttgactatgactctattatgccgattttacagtcgattgtcataggtccaaaggttgatttttatttaggtatcaagagtgagaacaaaaaaagcgcaggacaaaattatttttgtcctgcgcttttttgcttaaacgatttgtcctgtgtaaggttcgccggcgacaaattggaaatcaaaggttgctaattcatccacactggttagacattgggtaatccctttagccaacattaggttgatgggattggcttgtaaatcatcttcacaaacaaagacgattggtttatgacaggcattcaagtagccgacttcaaacgccgttcccgtatcttcgtcttgcatatcccataacacaactgccatgtctgctaaatccattgctgtgatgtcgttttgatacgtttggttggcccattcgtaacccccgaacatgccttctggatcatgatcttctgtcacacccttgtattgatgctcctgtggactatgaatataaccaatcgttgggttttgttttaaagccgcgtgtgcgcgttccactaatgaggcctgtttaggtgtaaaccaaccgccagctaagtatatttgtttttgcattatgattctcccactaaaaaagcgacgagcaagtcgaccttgtcatcgctttttaaaatttttaattgaattgtttagaattcatcttcttgtgcattggagtttaattccactaccttaccggttctgaggtagacaatccattcacagatgtttgtcacgtaatcgccaatccgttcgaggtagcttgcaactaacatgtagtccatgctcccaacgacggtttctgaatcacgttgcatttctttgatacagtcgtcataaatattgtctgaataagcattgattgcaacatcttcatcggcaattttgatggccttcttacgatcttctttgacgtaagcgtccaatacctcttcaaccatttgtttaactttgtctgccatatccgcaatatctttttcgatatcagggacacgggtattacccttgacccgaatcgttgatttcgcgattgaaacggcgtggtcacccatccgttctaaatctgaactagccttcatgattgtgacaatcacgcgaaggtcagttgagaccggttgttgaagtgcgattaactcaaaactcttacgttccaaatccgtttcccgttcattaatctgatgatcgtcagcaatcacctcgcgtgcgagttgcttatcgtgattaatgaaggctttaacagatttatagatggcttcgttgaccatcatccccatttcggagaagcgaacgtgtaaatcatttaactcatcttcaaaaagtcgtctcattgtggtttcccttctttcttagccaaaacggccactgatgtaatcttccgtttctttttcggttgggtttaagaaaatcttcttcgttggtgcgtattcaatcaattcaccttgtaaaaagaatgctgtcttatccgaaatacgagaagcctgatgcatattatgcgtcaccattataatggtatactgttggcgcaattctagcaacatattttcaattttagcactcgaaatagggtctagcgcagaagtcggttcatccattaagatcactttcggtttcacagctaacacccgagcgatacaaacccgctgttgttgaccaccagaaagtgataaagcactttcgtgtaacttatctttgacgtcgtcccaaacggccgcttgtttcaaactactttcaacggcttcatctaagacgcgatgatctttaacaccggataaacgtaagccgtaaacaacattgtcatagattgaaaatgggaatgggttcggttgttggaacaccatgccaacttctttccgtaacttaacggtatccatctcaggcgcataaatatcttggccattcaataagaatttaccggtcaccttcgccgagtcgattaaatcattcattcgattcaagcagcgcaagtaggttgatttcccacaaccagatggcccgatgagcgccgtaatttcattttcaacaaaatccatattaatcccttttaaggcctcattcttaccatagaatagatgcacatctgaggattcaataatcttatttgccacggggcaaacctccttgcgtcctagccaaagtgaccagaaacataatcttcggccgctttaatcttcggccgggtaaacattttacgtgtttcgtcgaattcaagtgcgtgccctgaatggaaaaaggccgtgtaatcactgattcgtgctgcttgttgcatgttatgcgtcacaatgatgattgtaaattcttcttttaagcgaatcaatgtttcttcaaccgtgttcgttgaaattggatcaagagctgaagccggttcgtccaataataaaatatcgggtttcatcgcaattgcccgggcaatacataaccgttgttgttgcccaccagatagtgccaatgcgctctttcctaatgaatctttgacttgatcccacaaagcagcttgttttagtgacgtttcaaccacttcatccagatactttttgtctttttgtccatgttgtttcaaggcaaaagtgatgttgtcatagattgatttggcaaatggattaggccgttggaacaccatgccgatatgttcccgcatcttatacacatcaacgtcatcgctattgatgttcaagccccggtacataatcttaccggtcacacgtgtattagcaatattgtcattcatccggtttaaactccgaagataggttgactttcctgaaccagaagcgccgattaacgcggtaattcgatagcgttcaaattgcaatgatgcatcgtgcatcgcgcgtttgtcgccgtaatagacgtttaaatcttcagttgataaggcaatttcatgttttggttcatctaaatgtttgatgtgcgtttttgttaaatcgtaatctgccattattttctcctatgctgctgtcattttacggtagacacgcttgccgatgacccgtgctaaccagttaaatagtaaaacggcgatgattaagacggcagatgcgccagcagaaaccgcagtcgcatccggcataatcccttccgagttaatcttccaaatgtgcaccgctaatgtttccgcaggtcgcaatggattcaacggactcgcgatgtacattgggttccagttggtaaaatcaagtgatggggcactttgtccagctgtataaatcaaggcagccgcttcaccaaagacccggccagcgcctaaaatcatcccggtaataatgttgggtaacgcttctggaatcacgacatgcttaaccgtttcataacgcgataaaccaagtgcaagacctgcttcacgttgtgtgaagtgaattgattttaaagcatcttccacattccgcgttaacaacggtaaattgaaaacggtcaaggctaaagcacccgctaagattgaaaagcctagcttaaactggataacaaagaccaagaaaccgaataacccgaccacgacggatggtaaggaacttaacacttcaatcgcggtccgaacaacattcgtcacccagttcttcggcgcatattctgcgagatagatgccggcaccaattgataacggtactgaaatcaccatcgccaaaattaatagatagaatgaattaaacagttggacgccaatcccgccacctttagtaaaggtttgcgcaggtttcgttaaaaactgccacgtcacgtgtggtaatccgcgcaccaagatatagccgagcaaacttgctaataataatacgatcaaaccagcgatgagggttagcacaccggtggcaactttatcccatttttttgcatccattagcgacccattgctcccttccgaccaattaaacgaactaataagttaaatagtagtgacatcaataataagagtaacgccaatgaccaaagtgcattattggctaatgaacccatgaccgtattcccaatgcccatcgttaacacactcgttaacgttgaggctggggtaattaagttatgtggtaataacgcagcgttcccgatgaccatttggacggccaatgcttcaccaaacgcccgggccatcccgaaaacaaccccggttaaaatccctggtgtggctgcttttaaaacgactttccatgttgtttgccaacgcgttgcacctaaagcgagtgaggcttcgcgataatgccgtggcacactcttgagtgcatcgactgtcatcgatgtcacagttggtagaatcatgacgaacaaaacacaagtcccggcaagaatcccaaagccactgccaccaaacaaatgacggacagctggtacaatcacggataatccgataaacccgtaaacaactgatggaatcccaacgagcaattccatcactggttgcaatactttttcaccccgcttaggtgagatttcagtcataaaaatcccagcgccaattgcaaacggtgttgctaataaagccgctaagaaagtcactccaaatgaccccataatcattggtaaggcgcccacttctggtcgaccatgactatctttcaaacttggattccaattagactgcgttaaaaagcggcctagattgattttatctttaaagaaggtcgctaacccttttgaagcgacgaagtagaaaatggcgagcacgatgaacacgattaaactaatacagaataaactgattaatttgccccgtgtttcacttttggctgcgcgtgatttcttaagtaaacttgctttaattggatccataattggccccctacttaacctttgtaattgtgccatcaaccgaccgttcaaccgtcatcttagcaactggaatatagcccatcttgccgacttgtttatgttgaacctcatctgataagacatacgccaagaaacgttttgttaacccagttggttgccccttggtgtaaacatgttcatatgaccagattggccatgcattagtcatcacgttttcatcggttggtgcaatgccgtttaatttaaccattgcaatcgaatcatctacgtatgaaaaagcaagataactgatggcccctggcgtgttcgctacaattgatcgcaccatccccgttgaatcttgttcttgagcgggtttagtcttgcgcgacttcatcacccattgttcaaacgtcgtccgcgtcccactaccttgggctcggtttactaaaacaaccggctgatctggtccaccaacgtcttgccagttatcaatttcgccactaaaaatcttcgcgagttgcgtcaatgttaagtttttaatccctaattgcttattaatgactggggtaatgccgacaacagccacgcgatgatcgaccagcttgtccgctttaatgccagccttttcttcagcaaataaatcagaattccccatctgtacagcgccagattgaatctgactcaagccagtcccagaaccgcccccctggacgttaatgaactgaccgctgtgatcagcactgtattgttcagctaacgcttcaatcagcggctgaagggctgatgagccgaccgccgttacggactgaccattttgtttagactggcaaccagccaatagtaataaactgaatgtgactaataagccaataacattacgtttgcgcatgttaatcctccacgaattccatttaaacctcgtaagttccattataaaaaaggtttgtaaaaactaagcctatcaaatgtaaattttgtgtaaatcaagcgtttggtagcttcaaaatgaattcactaccgacacctaattgactctttacggtcaactgcccctctaaactggcggtaatctcgctagcaattgctagtccaaggccggtcccgctcttatgggtcgcgcgcgcttgatcaacccgatagaatcgttcaaaaattctttcttgtaggtcacttggaatgcccaaaccggtatcgacaacgcggataccaatttgatctttttcaagttgcacggcaatcaccaacgagccgttttgtttattatacgtgatggcgttagcgattaggtttttcaagatttgattaaacttcattttctgaattctaatcgctaaatccgttggaatatcaacggagacgtgtaactgcttttgttgtgccttttgttgcatcagttcgagattagcctgcaccaattcacgtacattcacaagttgctcttgcgattggtccttacgatctagatgcgaaagcgccaaaatatcttgaatcagcgcagttaatcgcgtactttcgtcatagatgatttgtaagaattgcttttgcgtggcaggatcttccgccgcaccagctaacaacgtctcagcaaagcctgtaatagccgtcaccggcgtcttcaattcatgactcacattgctgacaaaatccaactgcatctgctcaacgcgccggacatcggttaaatcatataaaatgactaatgcttggaatttcgatttaaccgtattgagttggacaacattcgcatccacaaaccgttcttgattttgaatcaactgaatttcttggtgatgactctttcggtacctaaaagtgtgctcaatcatccgtgttaattcatacgtcttgatatcatcaatataggggtgtttctcagtaacaatcgtcgtctccaataaccgatccattgcttcattgtgcaaaacgacttcacgattttcgttaatcaccatgacgccgaccggtaaatggtcaattaggcggtcaaaactgccctgttgcatggcaatcttctgccgcatatgccgcatatcaccatttaatttattaatttcttgcgcgaggatatataatgacgcatctttttgaaaaataatcggttcgggcacttcttcatgccgaatatgatgaatattagcgactaaaattttcaagtggtcaaagaaatgatggcgttgccgccagaaacggtatagaaaaatccagctaccgattaaatagacaatcgtgaccgataaagcaatcttcggccacgtatgccagaactgttgctgaggcactactaagacaaagttgggccgatctgcttggtgtgcgtaaaacaaatacggttgcttattaactgtttgccgcgtactaaaattggcggcagaatgattccgattgacaatatccgtcactgctttttgcaactttgttttattcggcgattttggcgtcaaaacttgtaagccgttttggcgtaaccacttttgccgatcaaactgtggttgtttgatgattagcgcatagtcggcgccccgttcctttaacatcgcgtcttgttgttgggcaatcaccaaattgacaagcacaataaaacctatgtaaacagccactaaaatagtggctagctgataaaatctaaattgatcatgtttggtcatggttggggtcctccaattgataaccgaaaccacgcaccgtttttaagtaaactggatgacgcggatctgtttcgattttttcccgtaaatgactgacttgaatatcaaccattcgcgtttcggctggataatcaaagccccacaccgcatttaagagtttctcacggctttgaaccttgttaatccgatgcataaagtaaacaaggagttcgaactccttaggcgttaaatggagcttctgagtgccctttttagccacaacttcgccttcatcgaccattaagtcccctacttgtaaaatatcactagggtgcgtttcaacgactgctacaggctgtgccgtccgccgttcaattgcccgaatccgcgcgataatttcgcgtggactaaatggtttagtgacatagtcgtctgcccccacttcgaggccgacaattttatcggtttcgctatccttagccgttagaatcataatcggcgtttttaactttgcctcccgaatcttcttggtaacggtaattccgtctagcttaggcaacattaaatctaaaataataaaatcaaacgactgctgtaaagccatcgtcagcgcttgtgcaccgtcagttgccgtcatcactttaaaatgttcttgttccaggttatagcgtaataatgtcaagattgctggttcatcgtctaccactaaaattgtcttcattcatgccaccctttatttacttaattctctgggaataatacaacgcctaactcatgtggtgcatcagcaaaaattgcgccttcagccatccggaactcaccgtttaaatcttgaacctttaaatggcaatacgttggctgactttgaatcgcccgataaaaattatcgttatttgagacagcctcgccattacattcaacaattgtatcgccaacgaccaaccccattttagcagccggcgtttcgcgtaaaatccctaagataaagacgccatcgtagggtttcgtaaagtgcaactgccgttcatgggcactgcgtctactcaaccgccattgtaatgcacagcttagtactagcgcaactgttaacatgccaataatccagttcggaaatgcaacggcaattaacccaaacccaactaacaacaagccaaagatcaaatagctattggcatttttagtaacaactgatttcattaagcctttgactgctttcaaactaaatcccaataacaatggcaagattaccaagctatatgattgatgcccgatatttaagaccggccaaaaacccaaacttggcatatcaattgcccctggcactaagaaaaagaccggcgcaatataaatttgtcgactcataaagaaggccgtcaaccgccctcgcttgctagtcatcacacgcggtgtcacagttgcctcggcatcccaacgttgtaaaacactattgatgacggtcactaacccaataatcaccaataattcagccaaaagacttgcttgaccttccatctgatattggggccatatgaatgttgcaccagcgtagaccaaagcactgattaaaaaggttgccgatacgttttgccatctagcagccactagcaaactcaaaatagcgattagttgatagaccagccaccattgcatattaaccatcgcccctaacactaaggtacagcaacttaaggctagccctgcgagtagcccatggcccacaaaatggcccacttctatccatcgtggattaatcgcaattctaaaggtcttccgttccaagctaattcgtctatgcgctaaccagccagcatacacaatcgctaaccataaaagtggtgccgttagtaatggtcgcaaaatatcaatgatcatcgtcaattcaacaaacccccagcgtctatatttaaataccgtgcgtgtttccaacgacacacgctcgatttccagctgccgaatttcgcagttatcccaatcagtatagcattttgcccccttaactgcctagggttcaaaaaaaagagtgacgaacaatttaatgttcgccactctttcactaatttagtttaaattttaaggaaacgacgcattgagatgacagaacctaatgccccaatcacaatcccaatcacagccattgttaaatcaagttggaataagaaaattcctggtttcaacattgaataaccggctgaagccatgctgagtgccatatgacggtaaacccaaccataacctaagtcgattacaataatgggaataattaccccaagtaatccaacccaagccccttcaaaaaggaatggccagcgaatatacgagttagttgccccaactaaacgcataattccgatttcgtcgcgccgcgataaaatcgtaatccgaattgtattggaaatcaagaacactgccacaaagagcaataataaagtaaaaccaacgccccatttacggacgctactcattaccttgaacaacttcttagcgttgttcccaccataagtggcatcataaacgtatttcaattttttcgcttgtttagcgactttaatcgtttgacttggttttgtcgtacttactgtgtaaacatcgtacaacggattatcgtctccggtaaacatcttaaatgattgaccgtaactgccgacaaccttgtttaattcctttttacgacttgaatacgtcacttctttaacagacgccattttttcaagtttcttttgtagctgatctttttgtttacttgttgtgccccgttcaatcataacccgcacgtgcacatcattttcaatatcttgtgaaatcttgttaaagttgaagatcatcgcaaagaaaatcccgactaataacaacgttacggtaactgcactaacagctgcgattgacatccagccatttcgttttaaactcttaaaactatcgttgatatgacgcttcaatgttctaatcttcatagccgtagtcaccttctttttcatcacgaactaagcgaccgtcttcaatcgctaagacgcgatgggtccgttcgttcaccatttgtttgttatgggttgccattaagacaatcgtcccacgttcattaattgcttctaaaatatccataataccatctgacgtttcaggatctagattccccgttggttcatcggcaatcaacacatctggccggttcacaatcgcacgtgcaaccgcgacccgttgttgttccccaccagaaagttcatttggaaagcgacgaatttcacccttcaagccaactagttcgagcacttctaatacacgatctttgattgcttgaggttctgcctcgatcacttccatggcgtatgccacgttttcaaacaccgttaaacgtggtaataacttgaaatcttggaaaacaacacccatcttacggcgtaagtatgggacatcgtgatccttcataccgattaaatcaaaaccagcgacttcgatttcaccactcgttgcttttaattgatggtacaacatcttaatgaatgttgatttaccagcaccactgggaccaacaatataagcaaattcgccgggttcaatcgttagcgaaagatccttaattgctgtcacgccatttggatacttttttgacacatttgtcattcgaatcaattggggacactcctttttttgtcgttatcattatttattgtcaatgaaaaccgcaatcttttatattatagcatgctatttattcaaataatcacaatttgattacatttatatttcaatttctttgcagctagtcgggattcttctgactcaactgccattgcagataggcatacataaatggatccaaatcgccatccatgactgcttgcccgtttccggtttcgtagtcggtccggtggtctttaaccatcgtgtacggatggaatacgtatgagcgaatctgtgagccccagccaatttcaagctgttcgcccttaatagcagccgcttttttcgcctgttcttcttgttctttttgatacaatttagccttcaacatattcatcgcagtttcgcggttttgcaattgcgaccgttgcgcctgtgatgaaacaacaatcccagttggtaaatgcgttaaccgcacggctgatgatgttttattgatatgttgcccaccagccccgcttgaacggaagacgtcaattcgtaagtcttcggtgcggacttcgatatcaatcgaatcatccaattccggcatcacatcgactgaacaaaacgaggtgtggcggcgcccagctgaatcaaacggtgaaattcgtacaagccgatggacccctttttcagaacgtaacatgccatacgcgttgtgccctttaatcatcaaggtcacactcttaatcccagcttcttcaccggcctggtaatcttctgtttcaacggtaaagccgtgtgcatctgcccagcgtaagtacatccgcaaaagcattgaaccccaatcctgagattccgtaccaccagcaccaggatgcaattcaacaatcgcgttattgctatcgtagtcgcccgatagtaattgtccgagttcatattgttgcatctgaacttgaacagccgtcaaatcagcttcaaaactcgtctggagttcagcatcgggttcttcttgtaatagctctaatgtcacttgtagctcttctgattgcgcttgaagttgcataaaagcgtcgtatttttcctttatggcgttattttgatcaattaactgttgggctgctttttgatccgaccagaaatcgggatccgccatttgcgcttcattttgcgcgatgctttcttgcaggccatctaagtcaaagtgaccccctaaattgcgttattttagcttcaattgcttctaaaagatgttttgcttcacttaattccatattttagtccctccactattttttcccattaaaaaatggctaagttaactacctcagccattttctacgcgttagcgtcgaatattttgacggatttccgccttcatgaagagccgggttgtatcgtaatcgatgtcgctgatcatttcttcaaacatccggtaaccttcttcttgatattcaaccaatggattcatttgaccgtagccccgtaatccgattgagttgcgtaattgatccattgcatcgatatgatcggtccagcgttcatctaccacacggaggataacgactttttcgaattcgagcatttgatctgcatctgctaattgtttttgttttgttgcgtaattcttttctgcaaaggtcatcaataatgattcgatttcttcagcagtcttaccttgtaatttttcaattggtaattcttcttcactgaccattgaagttgtggcaaatgcgtggattgcttctaattcccagctccccatttcaccttgtgtatgcaattgcacaatccgtttaacggttcttgaaatcattggcatgataacttctttcaaattatcttccgccatgatgacctgcatccgttgtttatagatgacttcacgttgttcacgcatcacatcatcgtattgaagggtttgtttacgtgtatcgtagttattcccttcaacccgtttttgtgcggcttcaacttgacgcgtaatcatcttactttggatcaccgcatcgtcatctgaaatcttcatccggtctaggaaggctttaatccgttctgaaccgaaacgtttcatcaagtcatcttccaatgacatgtagaattgtgtgacaccaggatccccttgacgaccagcacggcctcgaagttggttatcaatccggcgtgattcatgacgttcagtcccaataacagccaaaccgcctaaatccgtcacaccaggtcctaatttaatatcagtcccacgaccagccatattagtagcgatagtgaccgcaccacgttgaccagcattcatgataatttcagcttctttaaagtgattcttagcattcaaaacagcgtgtggcacgttattttcatctagtaatcgcgatagtaattctgaagattcaaccgcaacggtcccaaccaatactggttggcccttagtataacgttccttgatatcttcaataaccgccttaaatttactttccaaagttggataaagcacatctggtttatcgattcgggcaattgggcggttagttggaattgagataacttccatgttgtaaatttcgcggaattcttcttcttcggtcttcgccgtcccagtcatccctgataacttgttgtacattctaaaataattttggtatgtgatattcgccattgttttggtttcatcttggatttcaacgccttctttggcttcaatcgcttgatgtaatccatctgaataacgacgaccatccatcacacgacctgtaaattggtcaacaattaggacttcgccttcttgaaccacataatcaatgtcttttaacatgatatagttggcccgtaatgattcgtccaaatgatgcgtcaaggctgtattttcagtgtcatataaattgtccaagccgaagttagcctcagctttttcaatccctgattctgttagactgatggtctttgttggccaatcaatcttatagtcagtttcttcttttaaagttttaacaaaacgatcagcacggatataaagtgctgttgacttttcagcttgaccagaaataatcaatggtgtccgcgcttcatcaattaaaattgaatccacttcatcgacaatggcaaagttcaatggtcgttgaaccatttcttctttgtaaaccaccatgttatcgcgcaagtaatcaaacccaagttcactattcgttgaataagtgatatctgagttgtatgcgtcgcgtttttcttctggtgtcttagcatttaagtttaacccaacagaaagaccgagccagttatataattcacccatttccgttgcatcacgacttgaaaggtattcgttgacggtaacaacgtgaacgcctttaccagccaatgcatttaaataaacaggcatggtagccgttaaggttttcccttcaccagttttcatttcagcgatgttaccttcgtgtagcgtaatcccaccaataatttgtacacggaacgggaataaccctaaaacacgtttagcaccttcacgcgcaaccgcaaaagcttctggtaaaatatcgtctaatgtttcaccatttgctaatcttgttttgaattctggggtcttagcttgcaacgcttcatcagataaattactatattcatcttcatagctttgaacttgatcggcaattttgcccattcgcgctacttcacgtttatcgctttctacccatgtttttagaaagtttgccatgtgcgtcaattctcctctagaaatacgtttgagttcttaaatagcgatttcttatatagtcaatatgattactaacaattcattttaccatttattacaatcaaataaaaccctgtcacagtaaacaatccagccaattcagtaaaaatttaaccccattatctatatggctacaaaaaaagggctgagcgcaactcatcgttgtcccagccctaacttaacgttcacttattcatcagtttcaatcaaaccgtaacgaccatcttgacgtttataaacaatgcttgtaccgtttgtttctgaatcttcgaagatgaagaactcatggcctagcatattcatttgtaagattgcttcttcactatccattggtttcaatgaaacgcgttttgttcgaacgacttgcattgattcttctggtaatgcttctgcttctggcaccgttaattccatacctttaatcccgcgttcacgtgatttacggttaatctttgttttaaatttacgaatttgtctttctaatttatcagtaactaggtcgacgctaccatacatatcaggcgatgtttcttctgctcttaatacaaggtatggtaatggaatggtgacttccaccttagcggttttatcggagtacacttttaaattaacgtgtgcagttgcggtcgctgaatcatcgaaatatttttcgagtttgctgattttcttttcaacataactccgaattgcgtcagttacctcaatattttcaccacgaacattaaaacttagcatatgaattctcccctttcacaaataccccctgtgggcacttgtcgctcggaactcaattctttcccgaggctttgttactgacttcattatatataatttgcgcgtaacacacaaataatatggtcctagtggactaaagtaattgcgtgaattggcagcgtttggtatcgcttgcggagacactgctgagcatgccataacgtgcgcccagtggtataaatatcatccaacaaaattaactgctgcaccttggaacccaacagcacgttctgcgcgcatttaaaaaattgcggcgttgctaagcgctctgcacgatttttttgtgcttgtcctttttcagttggtagcttctgcaacaatggggtcagtggaaaacagtcctcgtataagccaaccaccggattgaatccgcggctttgcaaatgtgttggatcagtcgggactgggatatacgccgtttgccgttgcacaggaaaattttctcgaatcagccgttgaaatacgtgacgtaatcgataatccccctgccccttatagcgttgaaaatactgttgcattggttcgttgtatgttaacaacgctcgattagtaaattgttcgcctggatacagttgctgccatctctggcaatccggacacaccccctgggttgtcatttgccgaccacatcccgaacaacactgcggcccaatccgttcaaactgtgccatgcaacgtgaacagatcatcgccggatagactggtcgcaatgaacaaatcaatgcaatggagggttgttcaaggataactgccgcacacattaaacagtggattgtaatcgccgtccttttcgattttgtcgtttaatttgttgacacgcacgctgaatagcgaccgtgtaatccgcgtagaaaaaataaaccggattggcagcatgctcttgctgtcgtccggctcggccagcaatctgtacaagcactgattcagtgaagaccacgtgttctgcaccaagaacaaacactgcaatatttttaaacgttacgcctcgttctagaactgtcgtcgtaatcagcacgtccccgcatcctgctctaaaggccgctatcttgtctaattgattaggatcgccagcatgtaccgtgttcactgtaatgtgtggcaatgcccgaacaacgctctgctgaaccgcctctaaatcccttacctgtggcacaaataataataagcgttgttcttgaagacacttcctgagtaagttgcgcgtcacggatggtaactgatgccgtttaactgaacgccgccacgtaaacaagggatagcaatgcggttcaggtaataagtgaccatgaaagcgaattggtagctcactacccgttaaatcccctgtattaatcgcatggcgcaactttacagttggtgtcgccgtcagatagatcaatgcacagcatggcttacacgcctgtttaacagccatctcaagctggggattattgacaaatgggaacgcatcaacctcatcgacaatgacagtgtcaaatgcctgataaaacttaaataactgatgggttgtacaaacaactaacggcgtataccggtaaggcgcagtctgttccccatgcatcagcatgattggtgtgttagcaaacgctgcttgcaagcgcggatagagttctaaacaaaccgccacccgcggcgcagcaacacacacacgctgcccattagctaaagccgtcgcaatgccttgaaataacatctcagttttaccagcaccggtcactgcagttaagacatggcgttgttgcttggtaatgaccgcaacaatctgctttgcggcttgtgcttgaaaaggggttagtgtccccgaccaagttagcggttctacgatcgactcaaacagattgcattcaggcacgtaaaccaactgatccccttccactaaccgcccaaaggtcaagcaagcagcacaataataccgaccatcaggtaagcgagcttgctctttcaccacttgtccacaccgttgacataccagacgctgattaactatttgaaacgctagtcgctgtttaatctgtggtaaactataattattcataacggtactcaattgggtggcactccactgacgaccataagcaagttgttttgccatcatttcaccttccatccttagttccgttaaatccagcttattttttcaaggagtccggtatgcaaagttattttaccgttcaaaaagacggcgaatttgaactcgaaatcaaaaagtcacgcttcatctgtcatgttgcgcgtgtcacagacgaaaccgcagcacaagcgttcatcgcacaagttcgcaaagcaaatctgaaggccaatcataattgtttcgcctaccaattaggtttaacggccaatattcaaaaacaaagtgacgatggcgagccaagtggcacagccggcgtgccaatgttagaagtactgcgccagatgcagctcactaatctgtgtgtcgttgtcacccgctattttggtggcatcaaacttggtactggtggtcttattcgagcatacagtcacgccacttcggccggacttgaacacctcggtattgtccaaggtatcgaacaaaccgcttgtcagattacaattgactacgctcaatttgacactgtgcaaaatttacttagccaattaaacctcactgccgaagacatccaatatacgactaacattcaaatgaccgtctggttagcgactacagcagttagtgatttacaacaacaattaaccgaacgcctcaacggccaattacaattcgaccttggccctcaacaattcaacgaagtccccattagcgcacaggatttacaccagattcgctaccaataacgcaagaaaaggattagccaatggctaatccttttcttcattcttcggttttaataatcgttttaaaagcatcaataatgggcggcgattgtcaccaagtaacccaattgattcaacaaataattctaagccaattaagacggctaccgtcaatgccaagcttccccagagtgtcgatagtgggtagagcaatgaaatcaacgagaagaccaatgccagtccataaatcacgagaaccgtttggcgatgtgataaaccaagttgcatcaaacgatggtgtaaatgatgtttatctgcttgtgaaatgggctttttattcaaaattcggcgcaacattgcgtaaattgtatccgtaattggtacaccgagaataataactggaatcaataacgtaatgaacgtcacgttttttaaacctttgagcgataagaccgcaatcataaaaccaatgaataaggccccggtatcccccaagaaaatcttcgctggatggaagttatgtggtaagaaaccgattaatgcagcgaccaaacaaaaaatcatgattgagacgctgacattggtgattgataagaagaaataggcgatgacgcccattgtgaagagtgcgataatcgaaacgccagttgctaagccatccaacccatcaatcagattaacggcgttggtaattgccagaatccaaaaaatggtgattgggaagcttaaccatcctagttcaaaggtgcctaaaaatggaattgtcaaaatattcatgcggacgcccgctaagaaataaatgaccaatgctgctaataaaataccgagcatcttttcctttggattcaattccttaatatcatcgatcatcccagtgatgatgatgatacattctgctaagaagatactgaaaagttcgtgtgtttggaattgcccgcgtaataatacgaaggtcccaaacgtaaacgcgataaaaatggccagaccacccattgccggcatcgcctttttattcactcggcgggcatttggtttatcaactgcgcctaaaacaaacgcgaggcggcgcactaatggggtaattgcggccgatacgagcatcgtcgcaaatagaccaactataattttaaacatgggttgcattcaacttgcctactttctcttgcattctctttattatacaaatcaaacccgttaaacacaacaatgacttgatttcttaagcaaaagccaagcaccctgattatctgtcccgcacaatctgggttaataaggccgtaaatcgtggatcagcattaaagggatgaatgtaatcaaattgttcgccttgattatccataaaatagtcccgattttcaacatcaatctcttcgatagtttccaaacaatccgcaacaaagcccggggttaggaccaaaatttttctaacgccttcttgggctaatgactgcatcgtagtgctagtgccggtgttagccattcattcggtccaaacttagattggtatgtggtccgaaaagtttgtttaggcaagcgcgcctgcaatagcgcagtagttgcttcacactgtgcttggtacggatccccttttgttacgtacgactttggaatcccatggtatgacaaaataatttcgtcataggtttgcgtctgtagcttctgttcaatcgccgttgccatcaagtcgatatagcctgagcgttgataaaagtccttcacaaaatgcaaagttggcatgtttgattgttttaaataaaactgcgcaactacatcataaatcgacatcgtcgtagtcgttgaatattgcgaatacattggcacgaccgccaaatcatcgattcccgccgtttgaatctcactaagcacatcggttaagaatggttgactatatgacatcgcctcaaaaacttgataatcgggtaattcagcttgtaattgagcaacttgctgttgcatgtacacttttaacggggaccagccgtcgtccagattttgcggtaggccgcccgcacttttttcggccgcgccatcagaatcggtccatataaaatggggagccaaaccgctttgggcatcgcaacgacccgctgatcagctaagaaatgttttaaaaaatggcgaatttctttgacttctggtttatctggggtccccaaattaactaataacacaccttctttcatgataatgtcctccacaattttaattaaaaccaaaaaaagagcggggaacaaaattggttttgtcccccgcttcaatgttaggccaatccgcattacttcgcgtattcgaccgttcttgtttcgcgaatcacagtcaccttaatgtggccaggatactcgagttggttctcaatttgattcttcacatcacgtgctaagacggttgcttggtcatctgtgacttgttctggtttaacaatcacccgaacttcacgacccgcttgaatcgcaaaactatgatcaacacctttaaaactattcgtaatactttcaagtttttcaagacggtgaatgtagttttcaagtgattcagaacgtgcacccggccgagccgctgaaatcgcgtcagcagctgcgactaagactgagataatcgatgttgcttcagtatcaccatggtgtgaaccaattgcgttaatcaccgttgccggttccttataacgcgttgctagttcaaccccaatttcaacgtgggagccatcgacttcatggtcgagggccttaccgatatcgtgtaacaagccagctcgtttagcgagtgtcacatcttcacccaattcagcggctaaaatccccgttaacttggccacttcaattgaatgattcaagacgttttgcccgtaacttgttctgaaatgtaatcgaccaagaatcttgattaaatcaggatgcattgtgtgcacaccaacatcaaagattgcttgttcaccgatttgtctgatttgttcgtccatttccttgcgtgacttatcaaccatttcttcaatccgagctggatgaatccggccatcttgaattaacttctctaatgtcatgcgcgcaatttcgcgacgaatcggatcaaacccactaagcacaactgcttctggcgtatcatcgataatcaggtcaatcccagtcagtgtttccaatgtccggatattccgaccttcacgaccaataatccggcccttcatatcatcatttggtaacgtcacaacagttactgttgtttcagcaaccatatccgctgcactgcgttgaatagcttcagcgactaatgtgcgcgcagtccgatcagcttgttctttagctgtttcttcactttctttgattaaaacagcccgttcatgttcaaggtcttgtttcgtttcatccaaaatgattttttgcgcttcatcatgcgataattcggcaatttcttgcaacttcgctttttgttgctcaactaaagtggcagcttctgcctgcttttcagttagctcttgtgcttgattcgttaaacgattttcacgttgctccaatgaacgttcttttttatccaacgttgcatctttgcgatccattgtttcttcccgttgaatcaaacggttttcttgcttttgtacctcactgcgtcgatctttcaattcattttcaatctcagaacgatagcggtgattttcatcccttgcttccaaaagaatttctttcttccgcgttgcggcttctttttcagctgctgcgattattcctgtggcagtcttatttgcaccatcaatttcacgttcgtgcgccttcttttgtagaacggaaccaactagtaaaccaacgattaacatgatgactgcgaggattaatggaaaagctaagttcattgtttcacctccgcatcatcaaaaattttgaattgcaactttcactgcaaatttttaaagatgttattatgtttagtttttcaacacatagttattttatagtttcataaaccgcctgtcaacttaaactatcggcattgcaaccgttttcgagttcagtcaatcaaatcgaccatcagaataattcggttaagcaatcaaaaaagctgaagcaaaataacttttgcctcagcttaatgattcttattcgtttgaatcgtcatccgtaaagacgtcgagttgtgtttcatcgctttcatctactgggacatccgaaataccatatgcttcccgaactttaagccggacttcatcttgaacttctggatgatcagccaagtaattcttcgcgttctcacgtccttgaccaatgcgttcatccccataggaataccatgacccactcttattaataatgtccttttcgaccgccatgtcgaccagttcacccgtttgtgagatcccttgaccatacataatgtcgacttcagccactttaaatggtggtgccaccttattcttaaccactttaatccgcgcacggttcccgatcatatcggtcccattcttgatggtttcagcacgccggacttcaagccgaacggttgaatagaatttcaatgcgcgaccaccaggtgtgacttcggggttcccgaacatcacgccgactttttcacggatttggttaatgaataacgcaatcgtctttgttttattgattgttcctgataatttccgtaaggcttgtgacatcaagcgggcttgtaacccaacatgcgcgtcacccatttcgccttcgatttcagcacgaggcactaaggctgcgactgaatcgacaactaaaatatcaacagccccacttgaaactaaggcatcggcgatttctaagccttgttccccagtatctggttgtgacaagagtaaatcgtcaatattaaccccgagggcagttgcatacttaggatccattgcattttcagcatcgatataagcagcagtcccaccttgcttttgcacttcggcaacagcatgtaaggcaacggttgttttacctgaactttcaggaccataaatttcaacaattcggccacgtggatacccacctacaccgagcgcttcatccaatgcaagggaaccagatgaaacagttgagacttgtgtatcaaccttttcacccattcgcatgattgagcccttaccaaaattcttttcaattttctttaatgcagcatctaaggctgcttgtctttcatctttagccaattaagtgccctcctcaaaagagtccttttcagtactctcttagtttaccgatttcacgaaataaaagcaagtaaaaatcgaacaaacgttctatatattttttaagctactctactatacccgaatcaccgcgtttttttcgtgctttttgggttaaaaaaactggcgtgggattccccgccagtttaagtttatttagaaaatgagtctttaaagacgcctctgttcttgatgaaataatcggtacccgaataaactgtaaagaacaagcaaacgtataacatgatctgtgccattggaatgccgatattgttaaagaagacgttgttgagtagcaatagaataatcgctaacatctgcgtcgtcgtcttaatcttacctggcatagctgcggccatcacttcgccaccttcgcttaataataaacgtaggccagtaacggctaattcacgccaaataataatcgcaaccacccatgctggcgcttgatctagcgccactaagaagataaatgctgtcatcactaataatttatcagccaatggatcagcaaacttaccgaagttggtcaccaaatgttgtgatcgggcaatcttgccgtctagtaagtccgtcaaagaggctacaatgaaaatcactgttgcaataatcgcactgactggaatacttgtcccagcgaccataatggctgtcgcaggcacatccaatactaaaatcaaagtaaaaatcggaatcaaaataatccgaaacatcgttaatttatttggtaaattcatgttgaagactccttaatgtcctttatttagccaatgttgctgtgaaattaatcgtccgcacaaacgttgcttcgttatttggactaaggttaatatcggtgccattaatcttcatcttcgttgcaggtgcattcccagtttgaatactaaattgcgtaacgccttcaggtaattcagcagtttgttcggcaccaactgcgacagaaccttgccaaatttgttggccattggccgttaagctgacccaagcagctgatttatcagctgagaacgtaatttggttggctttagctggcaagttcttaatttcaaaagcttgttgtgacccattaatgctggtcatcttcgccgttaattcttgcttcttagccttatcttcagcagctttcttgctagcttcttgtgccttactttcagaagcggctttcttactgctttcagcagacttgtcttcactactgctatccttcttaggatctggtttatccccagaaaccgtaaccgatgagcttgtttcgtttaacgtttcgcggtctttaccacggttgctgagcgcaatcccatagaccaccccaataatgatgaccacaattgccacaatcgtaatttgtgggacaaggttgcgccatttcgaccatttagaatctgttgtttcgcgcgtcaatcgggtttgattttcaacggatttttcaacatattcttctggtttcgtatctggtacagcatcttggtattctgccaacaatgcatcattatctaagcccactgtttgggcgtattgcttgataaatgcccgcacgtaaaaactgccaggcaaggcatcaaaattgccctcttcaatggcgattaaatatcgtttttggatttttgtgatttgttgtaaatcatcgagtgtgtagcccttttcaattcgtgcttcacgtaatttttgaccaatttcattcataatcaattccacccactattatcccagtatcattatccataattatagcatattggtacgtatgtgcattattaagatttctttattttaaccaaccaccattaacgtacaatgtctgtcccgtcatataatcggctgcaggtgccattaaactcaatacccaataggcaatctgtgctggggttgcaaaagcaccggccgggatctccgctacaacagcagcccgttctgctgttgtgaactgattgttcattttcgtatcaactgcgcctggtgcaaccacattaattgtgattccaagcgatgccacttcctgtgcataggcgttcacaaaggcggattgtgcgcctttaactgtactatatggcacttccattgcactgccccggccaccatagattgaaccaattaaaacgacgcgtcctaatggactttgcgctagtttcgcttgcagctgctgcatcaatagcattggtgctttaacgtgcacctgccataagtgatcgagtgccgttgcactgacctctggcaataagccatacgtcgtcgcacctgctgtataaatgaccgcatcgacttgaaaaagctggcctgtcaattttgcaacagcgtcctcttgggttaaatcagcttgaagcgcaaaaaaatcctgttttgggtagtcttgcaacaattgcttttgcagcgtcgtaacccgcgtctgattttgatgatagtgtaaataaagcgaccaaccgtccgccgccatttcagtcgcaaccgtcatcccaatatcaccggatgcaccgataattaaggctgatttaggcatggtttgctccctccggtaagatgtggcagactgtcatcgtttcaattttgaaataatcggttgccatctgttgcaagtccgctaaagtcacttgttcgatcaaacctaagacatcaaatggactgatttcggtaaagaattcatcactatattggttcgcaatggcttctagcgaattgaacgcttgcaagtattcaccaattgcggctcttttaaccaacgccaagttatcctctgaaaagtcaggactttccgtggcatgttctaagatattaataatcgcatccgataattcttgggcattgtccgcatcgccaccaagggtcacaaaattaaatgaccgttgaatggcaaattcgtaaccaaaactatcatcaagtgtgccatcatcgtacaacttttgcacttgcgttgatgaatcaccaaatagcaattcaagtaacaagttcatcttcaactttgtttcaagtgctaactcacctgttccgtaatccgttaaacctttaatcccgaccatgctcttgctacgcgtaattggcatttcaagtgaccgatacggaatgatatcatgaccatcttcagcttcttcaggcaatgaacgtacaatttctgttggttgggcaaatgttttttccgcttgattggcgttcaaccaatcaaccacttcatccggatcatcaatttgcccaacgataaagaggttcatattactaggctgatagaacgttgcatgtgcttgatagagcgcttccggtgtaatttgcgcaatactatccaccgtcccagcaatgtccgtccgcactggatgactcggatagagattgccaatcactgtatagaataagcgccaatccggttcatcattatacatctggatttcttggccaatgatgcccttttctttttcgaccgtctcagttgaaaaataaggttcctgcacaaaatcaagtagaatatccaaattttctcgcaagtgactggttgttgaaaataaataactcgttcgcgtaaaactcgtaaacgcatttgagcttgccccgtagcgaccaaacttttcaaacgcatcgtaatcttttttctcaaataatttatgttccagaaaatgcgcaatcccgtctggcactgtcacataatccgtttccccagctgggataaacgtcttatcgattgaaccataattcgtcgttaagattgcatatgtcttatgataaccgctcttagggtatattttaacggtcaagccattctctaattcagtttcatagagggtttcacctaagcggggattttgtctaagcttcatctgtatcgacccctttcaggaagtaaatggcttgcaattgcatctttgcggcttgttcttgaaccgcttgtttagaaaccgccaagatggcttgtgtaaatcgctctgcatcaatttcagtttcaggtacaaacaaacgattgaattgttgttgccccaaataggccgcactatcgagactcgatttaaattgattaatcaaggccaacttcgtttgttcaaagaccgcctgttcaaagtcacccgcgataatccgttgacgttgggcttcgataatctctaagacgcgatctttttggcgactttcaatcccagtctgtaccgtaatgacaccccgaaaagcatcgattgcacttgaggcatagtaggctaaactcgctttttcacgcacattggtaaaaagtaacgacagcggtgtgccaccgaataaggcgttcatcaccattgtggcataataatcagcttgatagaagtaagctggcatttgataggccatgtttaacttgccttgttgcaccgtttgtacttctgttttagtttgcacttgtggatataacgattgttgataaaaaatcgttggcagttcaacattacgcggtgcaaatggcaattgtgccaaatccgcgaccgttttggcttcgtcgatattaccgacaaacgtcatttggacccgatcgtttgcaatcatcgattgataatacgcatatagttcatccggtatgatggttgctaaatcagctgcatccccataattgggaatttgttgcgttgcatctttaaaatagagtttgcgtaattcaaccgccgcatatgattgcttatcatccgcaacactttcgatataccgcactaagttctctttttcacggttaaaaatgaccggattgaactggccatcaaccacatctggatgcaataataattgcccgataaacgcaatcgcttgctcttgcaagtcgattgtatcccgtagatattgggggctcacaattcgcattgagatgctaaaaatcgccaagtttccttgtcgataggcattcatattaaagccggcaccatacatggcttgtaattcattcgcaattgcgacctggtcacgataggcttggctactagcacctagaacgctcgctaataatgagcgccgggtcatcccatcagctgtgacgggggcaattaattgaacggtcaatctaattgttttaaattggttagtttgtaaaatattcaggtagacgccatccgttattttctgattcacgttatattactcctcactgtttcaacagttaaaatggctcttttcaacttatcctttttcatagcacggattctatcataccaaaaaaagaaggtgaactcaaaaaaggcagcgacaaaagtattttttgtcgcggcctttttcatttaatagtttaaccgagttccatcagccagcgcctttcagttaatcctgaatgtcaatcaatcgctgacgcgcttattcgccattttaggcgatattcgacttatgtcacacgctattgttctgttggttcttctggtacgttttgtaataacaccttgcgtggcttactaccttctgatggcccaatcacaccacggctttccatctcatcaaccaagcgtgcagcccggttatagccgactctaaaacggcgttggagcattgatacactagcggtttgttgtttaacgaccaattcgactgcctcttggtaatattcatcttctggttcttcagttgattgcttttcctgctcagtggttggaatcatttcttcgtcgtattcagccgtttgttgtgctttaataaacgacacgatactttcgacatcctgactcgaaatgaaggcgccttgcacccgtaatggtttgctcatcccgattggcatgtaaagcatatcaccacggccaagcagtttttccgcgccactgccatctaagatggtccgtgaatcaatcccactggatacagcaaacgcaatccgcgatggaatattggccttaatcaacccagtaataacatcgacagatgggcgttgggtagcgacaatcatgtgaatccccgccgcccgagccatttgtgccaaacgaataatcgcactttcgacttcgttgctggcaaccatcatcaaatcagataattcgtccacgatgacaacgatataaggcagtggtgcgcctttaatttcgccgtcttcgttgtggccttgaatatactgattatattcaatcatattccgctgacctgtatcggcaaataattgataacgtcgttccatttcttttacaaccttgttcaaagcgttagccgcctttttggcattcgtcacgacaggaatcaatagatgtggcaccccattatagacgtttaattcgaccatcttcggatcgattaacatcaatttaacttcgtgtggtttggcactcattaaaatacttgtgataatcccgttaattgcaacggacttcccactcccggttgaaccggcgattaataaatgcggcatcttggctaaatccgacataatgaccttacccgaaatatctttacctaacggcacagcgagtggtttgcctggatgtgggggttcttgttcaatcatttctctaaaggaaacggtcgaaacggtcgtgttcggcacttcaatcccgacatacggtttacccggaattggtgcttcaatccgaatatccttcgccgctaatgcaagcgccaaatcatccgctaagttaacaattttagagaccttcaccccaactgccggttgaatctcgtacttcgttacggctggtcccagactagcactcttaaccgtcacatcaacaccaaacgaatcaaatgtttgtttcaagacctgttgatttttctcgatagctttatattccgcactctgatcagacgccggaatttgcgttaataatgctggtgttggcaattcgtaatcatcatccgtctcgttcagtggtgcgagttctgccacatctggaacatgctcatcttcgtcagccaccggttcgggtgcagttggttctgcttgcgtcgcaattggttttggtagatccttgggaccgtttattttaaaaggttccaatttttgcttcggtgcattttctggaccatccgttgcgaccatttgctctttagtctctgacgtctcttctgcttgttcagttgcattttgaacagctttttgcgtctgttcttttaaagcactgacttgcgctttacctttttcagagaccttttggaaccctaatttcgtgtagccaccaactttaaagagcccatgcacaaaccgttgtgtactctgaacaacgacgctgaatggaatatctaagaaaacaaaaacgccgataatcacaattaagacggcaatcagataagtccccatctgcgcgaacaagaagtggaaaacaccatacaacgcggcgccaattaagcccccgccaacttccgtcgtaacggccatcttctggaagtcttccaataaaagctgccatgtggcggccaagaaatggttattgaccgcttgatggtgcaagacgaatgctgacaaccaaattaaaatcccgagatacgcgattgcaaatccaagcgtcttttggtgccataaggggggctgcttgccataaatcaacaaatagacccccaaaagggcgaataaaatagcactaataatgaatgtatcgccaacaaacagacggaatacgttagcgcaaagcccgccgataaagcccagctttaaacccgcaaataaactaattaaaataaaaataaacccgatgatgttaactgtgaaatcagtttgttgttttttctttttgcgtgctgctggttttctttttttacttttagtggccatgaaaatctccttcaaccttaaatcctactatccattatacacgaacatctgtactactaaacccataaatgtcagtcccgtaccgtttttaatcacggtactaaaaaaggccacggcaaaattgccgcaacctttcgctgattagtcttcgttggcttgcgctgtaaattggagttgaacgccccgatttaaagcaaccgccgtcacttgatacgtcaatgtttcgatgtattcaatcaatggtcgtgaaagcttcatcatgtctttttgatcaatttcacttggttcaccaaagaaatctaagagttgaaccacttgtgaaatttgacctgacactgcaaagccactcttttctggtgcaacttggaaaggcgtcacaatttggtaaatattccccgcgctcaaatcagcttcttgtaaatatggatcttcttcgctgatggtgactaagctgacttggatattttgttgtggttctacatcatgtgaaacacggtcataatgaaaagcatcaacagtaattggatctttcttcgtttgcatcaaaaacactccctattttaatttatcattgtcgtacaaatgactcttttcgagtcctggaaaatcttgttggcgcaatgcctcaaagatcactaatgccgcacagttcgagaggtttaatgctcgaatatggtcggacattgggattcgtaaacactgatcttcattttcacgcatgaaagtttcaggtaatccggtcgtttccttaccaaacataaaataatgatcaacacttgtatccgacacatcttgatcagaataagcttgcttagcaaacttcgtaatcaagtataaatattgacgatcgggcacagttgctaaaaaggcatccaagttcttgtgataattaatcttaacttggtcccagtaatcaagaccagcccgttttaaatgtttatcatcggtttcaaagcctaatggttcgattaaatctaaaacagtatctgttcctgcacatgtccgcgcaatattaccggtattggcaggaatcagtggttcgtataatacaatatgattagtcacggtctaaacttccttaaaaaagattcagtagattaattatacaatagaattcacaaaagctctaccttgctttgcaaataaaaaaacgtagtccctcggttattcacggcgagaaactacgttagtgtcatttcatcactagcttttatcaaaataaattctgataaaagttagggaaaaaattccttaaaaacattatagcgcccttattttagagttgcaatcagatttttaaactttctttaaattctcatcattttcccactaaaatcgtgacatctaatgaaatttcaggtagcgcttctaacgtgattgccgctaattgtgccttagaagccgtccacgtcaatggcgtcatttcgaccaaatcgcgcaatgtctcgggtgttaacgtcattgttttttgaacttgcatttcttgataatctggaaaatgttgcgcaaacaattctaagaccggaccatgatcatagctttccttagcttgaccatgatacagtaactcccgtaactcatgtaagtaacccgcattgggaatcaccttaattagttgaccgcccggtttcaagacacgtttaaattcttgatattgcgaaggcgaaaagatattgagcaccgtatctaactggtgattagcaaatggcatccgcgctaagtctgctgcacaaaaccacgcatcggcattgtaatcacttgccaattgaatcgcaggtttagaaatatcaaacccgatataacgcgcggaaacttgcgcattgagctgttgcactggcgttccttcaccacaaccgacatcaaggactaaactatcgggggtaatccgtgatgcaatttcttttaagaacggctgaaagaaccctgcttgtaaaaaagcccggcgatgttgcaacatttccttggtatattcagacttcatttgctttgctaaaaaatataacgtgccatttttagcgaggtcaaaactatgcccattgacacaaagtaattggtgctcggctacacttgcaaatacgtcctgacagattggacattgtaatacggccaagttcgtcgttaaaaactgcttggctaactcaatttttttcaaatttctgattctccttgatttaacgtgctttcaaaagcatcccgttccggttagctacattagccaaacaatcggctacgccgcttattcgtctaattaggctaatcctcaaaggatacccggtttgaacgcacttcttttataccgcactttacattcttaaaatatccagtagacttaacagtaagttattgatgaaggaagtgacaccatgctcgaaacctatcgcttcgacagtgctaagaaaaagctcaccaaacatgctaaaatccagtccaacagttggattaacgtaactgatccctcgactgaagaaattgagcttctcactaagaagctccacatcccatctgattttatctactatagtttagatgctgatgaaagtgcgcgtgctgagcacgatcctgattataatgcgaccctgattattttcaacataccaattcttgaaaaagacccgcaaaaaccagataaatacctctataaaacaagtcccttaggaattattgtaacagattcgaccgtcttaaccatcaacaaaacgccagtcacctttttacagagctttgttgatggccaaattaaaggtttcaatccacaaaatcaccgtagaagtgtcctccagattctcttccgcatttcatccatctatctccaatatttgcgggacatcaaccgctctcgtgaacaaatcgaaactcgcttgcagagttccctacagaatgaagaactcttcgatctgatgaccattcaacgcggcttagtttatttcatgatgtccttaaagaccgataaaatggtactcgctagtttaatgcggaccaatatgttagatcttaatgaagatgaaattgaattgcttgatgatattcagattgaaaatcaacaagccatcgaaatggcagaaatttccaacacaattattaacgaaacagccgatacttactcgtcaattattaataataacatgaatagtgttatgaagttcttggcatcttattcaattattctcaccatccccggattagtatttagtttttacgggatgaacgtggaccttccactgtctcgctccaaaacaagttggttgattactttattcatttccctgatcatttctggtgtgctagtctatcgcttctggcgcaagcggtacattaaatagagcgtgtgccagctcctgcggattagaactcgtttaacttacaaaaggccactatcatcaaacacattctcccattctttgggttcgaatgtgttttttatttgactttcataaaaaagctcgttattatacgttatgcacggataaattccgtgttacccaaaataaatgttcgtttttaaggagaattcccaatggacgtatttgattacgaagatgttcaactgattcccaataaatgtattgtgaaaagtcggagcgagattgatactagcgtccgctttggctcagaaacgtttaaaatcccagtcgtccctgctaacatgcagacgattattgatgaaccgcttgccatctggcttgccgaaaaccattacttctacgtcatgcatcgatttcagcctgaaaagcgtcccgcattcatcaagatgatgcacgagcgcggcttatttgcctcaatcagtgtcggggttaaagacgatgaattcgactttattaatcaactcgcaaccgataacttactaccagaatacattacaatcgatatcgcccacggccactcacaagtcgtgatcgatatgattcaacatatcaaaaaagtactgcctaagagtttcgtcattgccggcaatgttggtacccctgaagccgttcgcgatttggaacgcgcaggtgcagacgcaaccaaagtcgggattggccctggtaaagtttgcatcaccaaaatcaagaccggctttgggactggtggttggcaactggcagccctcagatggtgcgcgaaagctgctaccaagccgatgattgccgatgggggaattcgaaccaacggtgacatcgctaaatcaatccgttttggcgctagcatggtgatgattgggtccctctttgcaggacacgctgaatcacctggcaaattagtcgaagaagatggtcaacaattcaaagaatatttcgggtcagcttcagaattccaaaaaggcacacaccaaaacgtcgagggtaaacgcattttagtgccttataaaggtgcgattagtgacacgctcaccgaaatgcgccaagacttacaatcatcgatttcttatgctggtggtaaacgcttatcatcattgaagaaagtcgattacgttcttgttcgccattcaatttttaatggtgacatgctttaaaaagcagttaaaagagccagactaccttttaaatcggtagtttggctctttttagttaggtacctaaaaacttctctgaaatggttgaatccgacttgaaacaactgtataattacccgtgtcgcttttaaccttagcgtctacattgatcagaaaagggtgtgaaacaaatggatattaaacatacacttggagataacagtgttatctttcgtgatgcaacatacattagaagaacggtgtttgtccgagaacaaaatatgccggaaacccaggaaatcgatgcgcacgaagatcacacgattcactatgtaggttacctcaatcaagacccagcagtaaccgcacgcgtgcacgtcttaaaagacggtggatttagaattcagcgcgttgctaccatcaaagctttccgtggccaaggactcggctatcaattaatcgaagccatcattgaagacgctaaacgcaccacaacgccttatattattttattcgcacaggaccacgccattggtttctacgaaaaattaggctttattgtcacaagcgaaggcgaaatggaagcgggcatcccccaccactacatgaaattaacgctctaaaaaccaaaaaacgcacgatccgcatttattacggatcgtgcgttttttattgctcgtataagcctgaaactgacttgaaccattcaaaaaggtgactaattaatatcttgataatcgcatatactggaataccgagaatcacaccggcaaggccgaataactttcctgaagccagcaacacaatgattgtcgtgaccggatacattgccatcttgctccccaagaccaatggggaaactaaacgaccttccaaggtctgttcaacagcaaacacgatgagtactttaatcaataataacggcgagataaacgctgcaataatcactgacgggaccatcgctaggaaagagcctaaatacggaattaagtttaaaatccccgctaaaattcccaacgtcaacccgtacttcatcccaacaatccagtagcctacagtaaacatgactgcaacccaaaacgctactgtcaattggccgcggatgtactgactgacctgtgtgttaatttcttccaacactttcccagttgtggcgcgtactttaaccgggaagaattttaacaaatagcctttcattcggtgaccatcttttaacatgaagaataaaatgaacggcatcgttacaatcgcgatgactacgttcgtcaccactccgaccgctgttccaatatgactaacggtcgaagtcagcattttatttactttacttgataaattactaaacacatccgtattgatatcgtttaattgtttttgaatcgatttgaaggctgggtcgttaaaccatttcatcgtctgagtttgaatattcgcccaataagacggccactgatcaattaaactcgttgtctgggattgaatgattggaataatcgtcgcaattccccagaccagtaagccaacaattaaaataaaaataatcgtaatcgacaatacccgatttaaatgccaacgccgttcaaaccaatcaattaacgggttggtcaagtaatacaagacggccgcaataataatcggtaacccgataatcaacatcaacgactgaattggttttaacagccaagcaagttttgttaataaaagtataatcagcaacgttaataacacgtttaacaaaacaatcggtagcttcttatttaaaaaccatttaaagaaccatgaacgttctatttgtggctgtttattctctgtcacaccaattcacctaattcctacatagtttcttgatacgttatctgcgttcctactttgaattcaggaacagccggaacaccggcggcagctggcgttaaataaagcccactttgcagttgatcttcttgtggcgcaggtccaaaaactaaagcgacatgtccaatactgttgaggttaggatttaccaacgcgcccacatacgtaatcgtataaggttgttgattaataataaccgtagaatctgtcgtcagtgttagctgttttttggccgcttcgtccataaaatgttgaatcaatgccacgttttgaatggcagttgtcgcatgttcatcgaataaaatgaccatcggttcttgatcatcaatggcgtcgttgccaattgaaatgacttctgcttgcgtgttcataatgaaatctcctcttagttaagatagtatcattgtagcatattcgcgacttagttttagcgactagtgaatccttttagtaacaaattaaaccgttttcgcaggaatatgctatactcaaagagtatttgacgaagggagtctgattatgacagaagaagttttaattggtggttatacccgccggattggtaaaggaatctaccgcggaattttcgatgcaacaactgcaaccgtaagtgacattcaaccattcattaatctcgataacgcatcctatttaacgatttcaaaccgcaacatcctctacaccgtcattaaagatggggaccaaggtgggattgctgcctatgacttagctagtggcacccctgtctttttgaacgcggtcttagcagccggcgcaccaccagcatacgtggcagtcgatgaagaccgccaactcgtttatgcagccaattaccataaaggcgaaatactcgtttatcaaatccaagccgatggcagtttaaccttagcgagcacgacagttcatgaaggccacggtccgcgtcctgaacaagctagcgcccacgtacattataccgacctaacacctgaccaccgcttagtggtctgtgatttgggcaccgatgaattagtaacttatgccgtcgacaatgctggtcaattaaccaaagtagcaatttacaagagtgaacctggttttggcacacggcatttaatcttccatcccaatcacaagacagcttacctattgggtgaattgtccagtgaagtgacggtcttagattatcatgcagccgatgggacttttagcgcggttgctacctactcaatgttacctgcagattggcacgaagcaaacggcggcgctgcaatccgtgtttccaaagacggtcgtttcctttatgcttccaaccgtgggtataattcaatcgttgtgtatgccatcagtgatgacagtcgccaactacgagcaatccaacaaatgtcaacggatggtgaattcccccgtgacttcaatctttccgctaacgacgattttctattagccgttaaccaaaatagtgataatggtacgctttatcggcgcgatgcccaaactggtttattaaccgcctgtcaaaaagacttaaaaacacctgaaggcgtctgtgtcttattccattaaaataaaaaagattgaccgtattggtcaatcttttttatttacttcttttacgatccattaaattaataataattgcaatggcaattaacacaattgacgcaaaataaatgaagtgtaaaccattgtatagaatatggcgtaatgttggtaataattgtttaggtaagttcaaagcagtttctggattaatcaattcatttaacatgttttgatctaatcgaccatcaccagcaatcccttttgccaattgccgattcaaaataatcccataaactgaaaccatcaaggtttgacctaaagttcgacttaacgtattaaacgacgttgcaacaccaactttgtcagcaccagcaacgctttgtgccgtaacagtcgtcgtggtaatgattaagccaaagccaatccctaaaccaacagcaactaataagaagaaccaaaacggtgtggtttgtgggaccaatgctaagatgaagctcccaacaagtaaaatacacaaactaccggctagaattgttcgtggtgcgtgcttaacaagtaataggcctgcccataatgaggcaaaaatccacatcacagaactaggcgtcacaacaaagccccccatcgaggctttcaatccgaggatcccttgcatccacattggcatatagacttcaaaaccaattaagaaaccactcactaaagcagccactgcattttggacaacaaatgttcgatttttaaataatgataatgagataatcggatcttgtgcatgtttttcaacgcggataaagaggtaaaaagcaaccactgcaatcacgagcattgaccctaaaacgagcactgacggtttggcttcacccatgacttggaagccatatagtaaactcaaaagggccgccatcaaccataaactgccccaatagtcgactggttcagcactcgtcttcttctcttcttgaaggaagtaccagattaaaccaatcgtaataatcccaatcggtacattgatgaagaaaatccaatgccaggtcaacttatcaacaatgaagccccctaaaagcggcgcaatgatggaggcaatcccccatgctgacccattaaaacccaagactttcgcccgtttttcaatcggataaatatcagcaataatcgtaaatgataccggcataatcgccccggctcccaagccttgaattgcccgggaaataattaacgtccccatatgatttgacaatccacataaggatgatccgatgacaaacaaggccaaaccaaagatgaagattggtttacgcccaatccgatctgccatcttaccatagattggcgtcatcatcgcattcgttaataggtagattgaaaagacccagttcatcaatttcataccgtgtaaattactaatgatggttggcattgccgttgaaacaatcgtcccttcaatggctgtcatgaaagttgcgacgaaaatcgcaatcgtcacgagtaatacattcgtttttcttcccttactttgttccattcttagctccctctcttattcttgggcataaaaagagccttttcttaactcaaataagctaaggaaaggccgcctcttttactcgtctaataatacattaggcatttagtttagcaatacttgcctttaaggcatccactttatctaaacgttcccatggaaattcgacatctgtacgcccaaagtgcccatatgcagctgtttgcttgtatataggtctttgtagatctaacatttgaataatccctgctggtcgtaaatcaaagttttcacgaattgcagtttgaatcttttcttcactgacggtccctgtttcgaaagtatttattgaaacagaaacgggttgcgctacaccaattgcataggccaattgcacttcacacttgcgcgctaacccagccgctacaatgtttttagcaatgtaacgggctgcataacttgctgaacggtcaaccttagtagcatctttccctgagaaagcaccgccaccatgacgtgcataaccgccgtaagtatcaacaatgatcttacgaccagttaaacctgaatcgccttgtggtccaccgatgacaaaccgaccagttggattaatgaaatacttggtttgatcatccaagtatttggctggaataacggtttgaatcgcttgttcaagcatatccttttgaatggtttctaaagtcacatctgcatcgtgttgggtactgataacgacggtatcgacacgaacaggttgttcgttttcgtcgtattcaacagtgacttgcgccttagcatctggtcttagataagcgagttgcccgctctttcttaactcagcgactttgcgcattaaacggtgtgaaagggcaattggtaacggcattagttctggtgtctgatcgacagcaaacccaaacattaacccttgatcccccgcaccaatcttatcaagtggatcttcatcctttgcacgagattcaactgaatcgtcgaccccttgtgcaatatcaggtgattgttcatcaagtgcaacaatcacagcacagttatcgccatcaaagccataatgcccatcacgataaccaatccctttaatagtctctctgaccactttttggatatcaacgtatgccgttgttgaaatttcgccgacaactaggactaacccagttgtaacggttgtttcacaagcaactcgtgcttgtggatcttgtgctaacatcgcatctaagatggcatcactaatttgatccgcaatcttatctggatggccttcagaaacggattccgaagtaaataaatgtctttcttgcatttctatgtttccccctatatatgtgtcggttacaaggcctcttcacggtgtgtgaatcctatcgggaacttcttataactctactatcctagcacaaaatacaatccatttcaaaagccgttgaccttcttttcaaaaaaagttaagatgagacacatattctaagaaagaagtgttgctattgttctaccttaaccaacaacatctaaaggcttcaactcagccacaattactgactttgtttaattatttaaatctcggtttaatcgtcgggctgacaatgtggtcttttccaaagcaattcgggctttcattttatctaactgcgattctaggggcgctattagccattttactcgtcttatcaccccggtataaaccaaagcgaataattgcaactgctgcccttttagtcgcaattattctagccgcaatcatcggctggcgtgatctacctttgattgggcttctatcagggattactagcatttttgttctaatcccttttatctacccagaccagttcaaagaccgtacgttacggttatcatttcaattcttactagccccatttttctttttaattactcagattttcagtggcattcactttatccccgaggatttactcgtaaaattaggcctattcttaatcatcatttatcttctcgaactaacgactcacaatcggatgattactatcctcagttatgtagtatgggcgtgcattattattgcagtgattttaacgcatttaattcacggttggcatttaattctctttgcaggtggccagttattattaattgcgttacaactcggcctaatcaaacgtaactgctatttacaagagtttggatacttgctattaatcactggcgtctttaattaaaatgattaaacaacaaaaaagcgtaagcaataaattgcttacgctttttttaagacggtcacaacgggactcgaacccgtgatctcctgcgtgacaggcaggcgtcctaaccagctagaccatgcgaccgaatggaggttacagggctcgaacctgtgaccctctgcttgtaaggcagacgctctcccaactgagctaaacctccaaaaaaatgacccgtacgggatttgaacccatgataccgccgtgaaagggcggtgtcttaaccacttgaccaacgggccatgtcatttattatttaacggagagtgagggattcgaaccctcgaaacaggttagacccatttacatgatttccaatcatgctccttcggccgctcggacaactctccaaataatcgggtgataggacatctagtccttttgggccaaaggccttataacgttgaacccacgagacaactagtgagttactcttaataccatattttctcgctattaattcataacctaaggatgacgttagataatcctgaacaacttttatttttaatgttttagaatatttggtcaatataaaaacccccgatattggattttggtccaatatcgggggttcacttcagccgatgatgataatcgacacctcttttgttcgttattgaccgttccatggataatcggtactgatattttgattgaaatgtttttgactttgaaaatttgcgagacggtgggcttttcgttcctcataaccggcacagatgaaccgttcttccggtgattcgggttgaatgttaggaagggccggacctttttccattgtgacaaaggttaagaaggcagttagcccgaggaatcgttcgccggtcttgagatgttcaccgataatcttagtaaagatttcaatggaacgggtgccgacaccggcaacgtaactttcgatgcacaaggaatcttgcattttgaatggttcaatgaagttcagttggtcgatgctggcggtgacggtttcgacgcgcgctaagcggctagctgaaatggacgccgaaccatccaagagttcaagcaagcgtccgccatagaccgtttcatgttcgttcaaatcattgacgaagacgcgatggttactgatggagagggtttgacgacaggtgatgagatttgacattataaaaagactccttattaatcatttagatgggggacaatcagttggctagcagccaagtcgacttggtaaacgaatgcttgctcttcacgaatcgtcattcccatatcagtcgcgtagactaatagaccgagttgatgtcccgctgttaaatcataatgggtgggttgtaggtcgagtgtgatatcatagaattcgtttggggtgacggcgtcggtttgataactattgtggcgattttggagattgatgtgtcctttagtgatgacttgataattgcttggtcgattgagcttaaattcctttaaatcatcatagcgccactgatagccgagttgttggcctttagcagctaatacagcaggtgtggtgcctaaacggttgaattgaccatagtcaataaccagcacgctcaatagcccacgttcggcattgacagcgacccttgttctaaactgaattcggccatcaataatgagcggttcggtaagcgggaagcctaagaaacgcaaccggttgccagtgaaacttgattgatctgcgattaaggcatcttgccaagcggttgtactgattttttgggctctaaaggccgcaacaccgtcatctttaaaagtcgtcagtggggcattttcggtagcattagtgcttaatgtttgttcgtttagccagaaagtcgtagttggattgtcgagggctagccaatccgcctgggtcgtccaagtggcttcttgtgcgttgtcttgaattgtaacagccggtaattttgtgacagcctgattctcaacgccgagtaattgatgcgtgaaccataagttcatcatatcggtgaaatcgatcgactgaatgttattcatatagatatgttcaccttggtgtaagaaaagcttcttattaaccggttgatcgcgcaataaatcccacaaggcgccggcattttgtagtttaacgttccaatcatttaatccgtggactaagatgacatcgcaattcaggttggcgagattgtcacgatagttacgggctgcccagaaggcgttgtaattgcctgtgatgcgatcttgaccttcttgcagggctttgagttggtcggcgaagaaagtgccagagagcgcatgatcagcggcatctttttggcgggtttggcacaacttcgctaagacatcggcatcttcaccctgacaatcaattggggcgaccactaagccattttcgcggtagtaatcgtaccaactggaaatggcggcttcagctacaatggttctcagaccttcaacgccagttgttgcagcagcagtggctaaagtaccaaggtaggatttaccagtcattgcaacttggtgattacaccaccaagctttaatttcaatgccatcggtgcggttggtgaaagctcgtcgattaccggctaaccactcgatgatagccgtggttgaagctgtttcttcaggtgagccacaagtccggacgccgtcggaaccgcgtgtgccaatgccgccagcgtaaacgttcgcaaatccgcgcgccagaaagtaatcatttaaactgtaattgctgtcatctgttgcgtttaattcagttgtcatacttgtgccattaacggcgcgaggttgaggaagcggtgcagtggttggcgtttgggttaaatcagctaagcttggttgttgaacgggtttagtcgcaattgtagtatcaacattgtgcaaatcagcatcgacgtcgttaatccccttatagtaaggactggcagtgtagagtgccggaatttttaagcctgcttcagtttcgcgtggtctgaagatagtcgtttctaataagtcgcgttggccatcttgatcagtatctaggctcgattcaacataaacgacttctcgaattaaatggctggtatcgaaaacgggctggaccttaccattgaagatgagaaattggggctgatcactttgccagtctgcaaaaaaaccacggttagccaattgatccagataaagtaacccagtttggctacgcgtcgttaataggagataaagggcttcgatgaaagtggtctgatcaaatgccgcttgatcgataaatgggagttttgtggcggccataaaagcagtgggttgatcaagttcaaaatcggttgtcatttcaaaacccaagagttggagggcgacattatagaagacaacttgatcgaatgaagtatcaatggtttcaaggtaggcggttagatttaattcggttgtggcttgtaataaactaagttgcccgctctgggttgattgactatgtgcttctgggaacagccgttgaaaaatatcttgggcaaggacttggaaggggagctgggtgaaatcctttgggagtaaatgaatacgctgtaattccgtgatttgttcagattgagatttagttaagcgtgaaaactgatttaattgcatgtttttccctcatttctgcgaattttaattgacagtgactacttcaattgcttataatatagcatgttgtgtggtattctgacagcaaaaaccgtcaatcaatgaggtcatagtagctcagctggatagagcaacggtcttctaaaccgtaggtcgcgagttcgaatctcgcctgtgacattcaataattcttggagacatctaatttcgcacattgcttgcgaggttaggtgtttttttaatgatggagtgaatgtaaaatgcaagattatttaaaagcgcatcaaacatggttagttgatttttatcaacaacggaattggtatcgattttcaccattaattcggttgaacttcttgagtgaagaacttggggaattgtcacgggccgttagaacgattgaacttgggcgtgatcacccagggaaaaaagttaaaaacgacgttgaaaagcaagctaacttaaaagaggagttagccgattgcttcgaccaactgctcattatctgttcgaaatatgaaattgagcctgaggaattgatggcacttagcgaggcaaagtttacaaaacggttcgaaaatgattagaaattaaatatttaaataaaaagtttatgcgctttaaagcctattttaatagccttttgcgaatgaattgcgagcgatttagtcgatagttttgggatgcgggttgctaattagaaaatgccatgctatactgttcaagtaatcaaattttgaaacgtaatttgagttttggatgcacaataccttcctcttttacctatcaataatttattgcaacaaaaaacgtacattgatatgtatcaggaggaaattattatgaacaacggcacagtaaaatggtttaacgcagacaaaggttttggttttatcactggtgaagacggcaaagacgtatttgctcacttctcagctatccaaggtgacggttacaagtcattagacgaaggccaagcagtatcatttgatgttgaagacagcgaccgcggtcctcaagcaacaaacatcgttaaactttaatatttgtgccccgcatccgcggggtttttttatacaatcaaataagtaaggacctgagacaaaaactgtctcaggtccttttttagtttagtggaaaataatattctcatgttgccactaatgataagcgattttatagtctcaattactctgttaaatactgtaacaaatgcttttcggcattatcatagttgtattgccgagcattgagtaacaccaagttgcgatcattatcaaaaaaattaccggtgctctgcgttagatcgggatggagtgctaagtattttccaactggcacttcagtatgcagcaatgtttgggaataatgcggtagctcatcggtgacattccctgggaaaaatgaattgaccgtaatctctttttcagccagaaaataactgagaaagagggttaataaagctttatgggttaataaccaccttgcacgttgtaaagtagtctcctgttcttcgcaaatgctgagttgttgaatgatttgcggatcaccggttatgataaggacgcgaccgccagttaatcggtctgctaagcccattgttagctgataatgggggactaaattagccttaatattttcttctgctgagctggggaaaacaccggcagtgtgcactagaacgtgtattttatccactttatatttgatgcttgccagtgcttggttgcgtcctgatttggtcgctaaatcggcttggataaaaaaggccgcttttccaagttgggccacagaagcccggccttttgccgcatcctgtccaacgataatgacttgatggccttctgcaatgagatctttggcaatgcgatagccaatcccagatgttccaccggttattacaatatccatatgtgacagtcctttctttttcaaattattatttaagttgattgatttagaaatgagtgcatgagatagctattaagtgctttcgttaattaacttagggtcagtatatattaggctttttagagataccaattctttaactcgaattcgtgcaccatcgacggtactatagctattaacgatatgtcttttgtttaggcagttaaattgtcaaggtcctattgggttcagtatgatgaacatatagttaggattcgcattcatttcattaataggagggtgttgctaaatgattacaacgtataagaaaattttagtcggggtcgatggatctgacttagcgaacaaggcatttatggaagctgttgaagttgcgaaaagaaatgatgctgagctttatgtggctcatattattccaagtacagtctatgtttcaccggatgctagtgtctatgcgaagatgacggcgatggaaaaagatcgtgtgaaggagcaactagcggctaatattcgttacgcgaataatcatgggctaacgaaggtcaccccgattctggaagtcggctcaccgaaaaaagaaattgcgattcgcattcctgaagaatatgggattgatttaatcatgttggggattacggggaaaggggttattgaacgaatgatgatgggatcggttgcccaatatgttagtgcccatgctgcaacgaatgttttattagttaaataagaacgtctggttccaaaaaagcggtcacgacattttttgtcgcgaccgcttttttgcgtgtggttagatgacaataatgtcactgttcaaatccaaaagcgtattgtacattaatattgtaataaattaatggatagattagaaatttcggagggacagttgatgtcaaaaaaagggcgtcaaattggtggtgtcattggtattctggtcatattcggtctggtagcgggcggaattgtggttcagcgacaacatcaccaacgagaagtaaaaatcgcgcaacaacaagccaagattaagcgccaacgacaagcgcaagaagcaaagaaacagcgcgaatcacaaaaagtcgctgctgctaaagcaaaggaagaacgacttaaagcagaaagccaaccgacaattgttgcagaacaagcgttagatgactacttaaagcaaattggcttttcaggtaccgcgttaattgtccgcgataagcaagttttgttggataaggggtacggcagtgctaatcgggccaagcagttggtgaatacgccagatacgctatatgcgattggttcaactgaaaaagcgttgattgcaacgagtttattgcagttacaagaacaaggaaagctaaacgtcaacgatccaatcagtcggtacctcccggactttccgaatgggcagcagattaaactgactgattttttacatcatacatcaggcattgtcggtcgggaccaagataatcagacgaagactctcgaccaattaatcgaagaaattattaaaaatgggattaaggaacaaccgggcaagtggcactatatggatgcgaactatattgtgctgacgaaggttttggaaaaagtgagtcatcaagattacaaaacgtatctaaaagaaaaaattctaaaaccaagtaaaatggcgcacactggtttcatgacggatcaatattcgcgattaccagcggcttccattggctatctggcaaatggcgctgcgggacaactccccaatttcacgcaactaccaggggtcggagatatgtatatgacggcgactgatatgtaccgttttgaccgcgcgttgtggactggaaaattaattaatgaacagagtaaggctcaaatgttccaaccagggagtacgtcccactatggaatgggcttttacaatgatccagcactcattgttaatcgtggttatttgtcaggctggaatgtgtcgaacggatttagccacggtggccgaatctatatcgtgttattttcaaacgaaaagaacgaaaaggtttcgctcagcaagatgaacggtgaattatatactaaaataactgcaacgatttaagtaaaaaaacgggtttaatgattcagatgaaggactttaattagtgttgatctgagattattgacccgttttttaattttggatgtgctacaaatgtcgaattggtaaggatgttaaattgtgtaaaatttaatttgggtaaaacgctttctttttggacatcggtaatctataatagttttcgaggaaacgttttcctaacattgttgttaaaggaggattaagatgactgaaaaatacattttggcgattgatgagggaacaaccagtactcgttcaatcatttttgatcacaatggtcaaaaagtcgccgatgcacagcgtgaattcccccagtacttccccgaaccgggctgggtagaacataatgcaaacgaaatttggaacgctgttttatcgacgattgcaaacgcttttatatcatcggggattcaaccccatcaaatcgcggggattgggattactaatcaacgtgaaacaactattatttgggataaggaaactggtttaccaatttataatgcggttgtttggcaatcaagacaaacaaatgacattgccgaacaattgaagaaagatgggcatgaagaattattccatcaaaagacggggctattaattgatgcttacttctcagcgactaagattcgttggattttagatcaagtgccaggtgcacaagaacgagccgaaaagggcgaactcctctttggaaccatcgatacttggattacatggaagttaacaggtagcgcttcacacgttaccgactatacaaatgcaagtcggacaatgttgtttaacattcacgatttggattgggacgacgaaatcctcaagattttaaacattccacgggccatgttacctgatgttcggtcaaactctgaaatttatggtgaaacagcaccttatcatttctatggtagcacggtaccaatttcagggatggcaggggatcaacaagccgcattatttggtcaattagctctccaaccagggatggttaagaacacctatggtacaggttcatttattgtgatgaatactggcgaaaaaccaacaatgtcagaaaacaacttgctaacgacaattggttattcaatcaatggtaaagtcaactatgcacttgaaggctcagtcttcgttgctggttcagccattcaatggttgcgtgatagtatgcaactggttgaaaaatcatcagattcagaagcagccgctaaggcttcaaccagtttaaatgaagtttatgttgtgcctgcctttacaggtttgggtgcaccatactgggactcagaagcacgtggttcaattctagggattacgcgtgggacgaaccgacaagacgttattaaggcaacactgcaatcattagcttatcaaactcgggatgtcgttcaaaccatgcaaaaagatactggcattgatatcaaagtgctccgcgttgatggtggtgctgcaaacaacaactatttaatgcaattccaagcagatattttgaatagctcgattgaaaaggcagctaatttagaaacaactgcaatgggggctgcatttttggctggtttagcagttggtttctggcaagatacagacgaattggcgcatattttctcagttgggcaacgtttcgaaccagaaatgcctgaagaagaacgggaagatctctatgctggttggcaacaagcagttgaagcaacaaaggttttcaaacatcgaccatataaaatgcgtgaatgaggaggattataatgacattttcattagaaggacgtcaacaagtaattaataacttaaagaacgaacaacttgatttattagtaatcggtggcgggatcactggtgctggggttgctattcaagcggctgcatcaggcatcaaaaccggtttgattgaaatgcaagattttgctgaagggacttcatcacgttcaacgaagttagttcacggtggtatccgttatttaaagactttcgacgttggggttgttgcagatactgttagtgaacgggccgttgttcaagggattgcacctcacatcccacggcctacaccaatgcttttaccaatctatgatgaacctgaagcaacttacgacatgttcagtgtcaagattgccatggatttatacgataaattggcaggggtaactggtacacaatatgccaactatacaattgatcgtaaagaagtactccaacgcgaacctggcttgaagtcagaccgtttgatgggtgctggtgtttatttagatttcgtcaataatgatgcgcgcttagtcatcgaaaatattaaagaagctgacgaattaggtgcatcaatcgcaagtcacgttaaagcagtcggaatgacttatgatgcaaacggtcgcgtaaacggtttgaaagcacacgatgaattaacggatgaaacattcgatattcatgccaaattagtcattaatactgctggcccttgggtggataaagtaaatgctttaaacacggaagtcaaagcacaagaaacacttcgtcctactaaagggattcatttagttgttgatagtagtcgtttatcagtgccacaaccaacttacttcgattcaggcttacatgatggtcggatgattttcgttgtgccacgcgaaggtaagacgtacttcgggacaactgatactgattacacaggcgatttcaaacacccacgtgttgaacaagcagacgttgattacctcttaaaagcaatcaacaatcgctatcctagcgttaatatcgctttaaacgatattgaagctagctgggcaggtttacgaccattaatttctaataacggtagctccgattataacggtggtggcgctaatagcggtaaggtttcagaagaatcattcaacaacttaatcaagacagttgatgattacgaaaacaaaacagctgctcgtgcagatgttgaaaaagcaatcagtcaattaagaacggcgcatgctgaagaatcagtcaacccatcacaagtttctcgtggtagtgatttgaaagtggctgaaaacggcttaatcactttatcaggtggtaagattactgattatcgtaagatggcagccggtgcgcttgaattaatccgggatatcttgaagaaagatttcaatgaaacagttcgtgaaatcgattctaagaaattacaagtttcaggtgggcacttcgatccaaataacgtggatgatacccttaaattctatgcaaaagttgcgatgaacaaagggattgatgaagaagatgcgattgatttagcaaaccgcttcggttcaaacgtcagccgggttgtttcatacgcggaccaaggtgctgctgaaggcttgaacttgaaagaaacaatcagcttaagatactcagttaacgaagaaatgacattaacaccagttgattatcttttaagacggacaaacttcatcttattccacaatgatcaattagcagccatcaaacaaccagttgttgatgaaatggcgcgtttattgaactgggatgacgctgaaaaagcacgtcaaacagaattattggattcagcaattgttgaagcacaattagactatttaaaataggacttaacttggaggaaatctcatggaacattcaataatggttcaggcgcttggtgaacttgttgggacgtttatccttgttcttttaggggatggcgttgtagcgggcgttagcttagcaaaaacaaaagccaacggtgctggctgggttgctatcacgcttggttggggctttgcggttactttaggggtatatacctctgcatttatgggacctgcacacttgaacccagcggtgacgattgcttttgcaatgattggcaagaccccttgggcagcggtggtaccattcattatcgcccaaatgattggggcgttcttaggcgcagttgtcgtttggattcaatactatccacattggcaagctactaaagatcaagcagcaatcttaggcacttttgcaactggccctgcgattcgcagcccatttgccaatttaatgagtgaattgattgggacattcgtcttaatcttcgctttactagcattaacacgtggtgaattaacagccggtttgaacccattagtggttggggtggttatcacagcaatcggtctatcacttggtgggacgactggttacgcgattaacccggctcgagatttaggcccacggattgcccatgcagtcttgccgattgccaacaagggtgattcagactggtcatacagctggatcccagttgtcggtccaatcatcggtgggattttaggtgcattactcttcgttgtattgccataacgataaaaaaacgattaaccaacaggttaatcgttttttttgtgtatttatgatttaaatacgaattattaaatgtatttatataaaatagttcgtaaaatattttgacatatcagatgaagattgttagaatcaaagcataatcaacaacgagaaagtgggcaaagaatatgagtgatgtggcacttgttatgggctctatatcagattggggaacaatggaacagaccgcttctgtattatcggagttgggcgtgagttatacgaaacagattatttctgctcatcggatgccggatgaaatgttcgccttttcaaaagaagcacaggcgaacgggtatcgtgcgattattgctggtgcgggtggtgccgcacatttgccggggatgattgctgccaatacagtcttaccagtcattggcgtgccaattcaaagtaaggcacttagtgggctggattctttattatcaattgtgcaaatgccaggtggcgtaccagtggcgacggttgcgattggtaaagcgggggccgttaacgctggtattttagcgacacagatttgtggcttgcaggtcccagcttatcaagtggcactgcaacagtatcaagcacggatgcatgcaaaggcggtggcaagtaatgcagactttgactaaccaaattttaccagggcaaacgattgggattgttgggggcggtcagttaggtcagatgatgacattagcggctaaagagatggggtttgcagtgattatcttagatccgcaggcagactgtccagccggacaagtcgcggatgatcaaattgtggcagcttatgatgatcaggcacaaattatgatgttagcgcaacgtgtcgatgtgttgacatatgaatttgaaaacgtcgatgctaagacgattgaagctgcccgagaatatacatggattcctcaagggacgaaggcgctacggattgctcaagaccgattgttggagaaacaatttcttgttgaccaacagctaccacatgccacctttgagattgtaacgacccctgcagaattaataccagctgttaaaaaagttggttttccttgtatcttgaagaccacgcgcggtggatatgatggtaaaggacaagtcattctacggtccgcaatggatatggaggtggctcaacagttgttaaccgctagtgtttgtgtattagaagcgatggtccattttgatcaagaaatttcggtcataattagtcagaattcagccgggcaacaagccgtttttcccgcaatcgagaatcaacaccgagataacattttacatatcagcatctgcccggcgcgcatttcagcggcgttagcggcacaagcggaatcggttgcggcaaaaattgccacgcagattgaattagtcggcacgttaggtgtcgagttttttgtcggccatgacgggcaactctacgttaatgagattgcaccgcggccgcataattcaggtcatctaacgattgaagcgtgtgacttttctcaatttgcaacccacattcggggcgtctgcaactggccactccaaacaccacaattgtggcaatcagcggtaatggtcaatattcttgggcagcactggcaagcagcactaacagccagtcggcagtcagcagattggcattatcacgactatggcaaagtggttcaaaaggtcaaccgcaagatgggccacgtcacgttattaacgccggctgttgatgaaacgttaacggcaattaaaaagactaaaatttgggactagaggggacgctaataaatgattgaacggtatacaaatcctgaaatgggtgcgatttggacggaccagaataaatatgaggcatggctggcagttgaaattttagcggatgaggcttggtcagaactcggacacattccggctgaagatgttgcgaaaattcgtgccaatgcgatgttctcaattccacggatcttagaaatcgaacaggaaacgcggcacgatgttgtcgccttcaccagagcagtttctgaatcacttggagatgaacgcaagtgggtccactatggtttaacatcgaccgatgtggtggatacggcgtatggttatttgttgaaacaagccaacgccattttgcgggccgatatcgatgcgctattggcggtgattgccaaacaagccaaacgttaccaagatacggtcatgatgggccggacgcatggtgttcacgctgaaccaacgacgtttgggttgaagctagcactatggtattcggaattaaaacgacataaggcacgttttgaaaaagctgcaaaaggcgttgaagccggtaaaattagtggggcggtgggcacgtttgccaatattccaccgtttgtcgaagcctatgtgtgcgaacatttaggaattcgcgcccaagaaatctcaacacaagtcttaccacgggacttgcatgctgcctacgtggctgaaatggcgttactagcaacttcaatcgagaagtttgcgactgaaattcggggtctccaaaaatctgaaacccgcgaggtcgaagaatttttcgcgaaaggccaaaaaggctcatcagcaatgccccataaacggaatccgattggttctgaaaatattacgggcttggcacgcgtgattcgcggacacatggtaacggcgtatgaagacgttgcactctggcatgaacgtgatatttcgcatagttctgccgaacgcatcatcttaccggatactacgattttgttggattatatgcttcgacggttcaccaaaattatgacggacttgacagtcttcccagaaaatatgaagcgtaatatggggcggactttcgggttgatttacagccaacgggttcttttgaagttaatcgatcatgggctttcgagagaagcggcttatgacttgattcaacctaaaacggcccaagcttgggatcaacaaactgatttcagaccgttgttagaagcggatgaccggattatgaatgtgttgacgcccgctgatttagacgacgcgtttgattaccattaccatattcgccgcgtcgcagaaatctttgaccgcgttggtttgggcgaataatgatgaaaactttgaaatgaggttatttcaaagtttttttacaccctaatgtaacacgaacgattattttaattttaaataaaatgtatgttatttggagggattcaagcatgagtgagacgttgttttattctggaaaagcgaaagatgtttttacaactgacgatcaaaatgtgttgagaatggtctataaggaccaagcaacggcgttaaatggcaaacgcaaggaacagattacgggaaaaggattattgaattatcagatttcgaaattaattttcaaatacttgatggcaaatggtattgaaacgcatttaatcgagaatatttcagcaactgaacagctcgtcaagaaagtgacgattgtgcccctagaagtagtattgcgcaacgtggtggcagggagttttgcccgcaagtttggtcaagcaccgggcaaacgattggccacgccgattatcgaatactattacaaaaatgatgcactagatgatccagccatcaatatttcgcaagccaccgcgcttggaattgtgacaccggcggaaattgaagtgattgaaaaacaaactaagcagatcaaccagctgctaatcgatttattcgaccgtgcggatatcgatttaatcgactttaagttggaatttggccggtatgacggtcgcttgattttggcggatgaattttccccagataactgccgtctgtgggatcaaacgacgcatgaatcgctagataaggatgttttccgcttgaacaaaggggatttagtatcggtgtacgatgtcgtattacgacgattagaaaaaattttagggggttctacagatgtttaatgtgcgtgtgcaagtgacttataaagattcggtgctagatccacaaggccaggctgtccaaaaagctatcgaacgacttggctttgatggtgtgagcggcatgcgcattggcaagtcctttgaaatgcaagtggctggcgatgaccaagccgcagttgaaaaaaaggtcgtacaaatctgtgatcaactcttagccaatcctaatatggaacaataccactacgacatacaaaaggtggcgacgaatcaatgaaatttgccgtattagttttcccaggttccaattgtgacgctgatttatatcatgcaattgaagatgtttgtcatgaaaacgctgagtatatcccgtacacagcaactagcctggcaggttttgatgccgtattagtgcccgggggcttttcatacggcgattatttacgcagtggtgcgattgccaagttggcaccgattatgacggcagttaaggcgtttgcggctgatggcaaaccggttatcggtatttgcaacgggttccaaattttaacggaactcgggttattaccaggcgttcttttgccgaatcgacaaacccattttatctgtgacacagtcgcgttgaacgtgaccaatgccggtacgatgttcacccaacactatatgccgaacgaacaaattcggttgccgattgctcatggtgaagggaattattattgcgatgcagagaccctggaacggttaaaagtgaaccaccaaattgcatttacttatcaaaatgatgtgaatggtagtttagcgaatattgcgggcgttacgaatgaagccggcaatgtcttagggatgatgccccatccagaacgcgcagtcgaaaccttattaggtagcgatgatgggcaacgtttatttgcagcattaatcacatcgattcgaaaaggagggcaataaccgtgttaaagcaaccaacagcggcagaaatccaagccaccaagctttatcagcaatgggggttatcagatgatgaatatgaattgattcgtactaaaattctaaaacggttgccgaattatacggagaccgggttattttcagtgatgtggagtgaacattgctcatataaaaattcgaagccggttttgaaaaaatttccaacaagtggtcagcacgtgttgcaaggcccaggtgaaggcgctgggattttggatattggcgatggtcaagcagtggtctttaaagctgaaagccataaccatccctcagcagtcgaaccctatgaaggggcggccaccggtgtcggcggtattattcgggatattttttcgatgggcgcgacgccgattgcgcttttgaacagtctgcgctttggtgaattgacggatgaccacacgaaataccttgttcaagaagttgtggctggaatcggcgggtacggtaattgtatcgggattccaacggttggtggtgaaatcggatttgatccatgttatcagactaatccactcgtcaacgcgatgtgcgttggtgtcatcgaccaaaaggatattcagcaaggtaaagcgcgtggtgctggcaatagtgtgttctacgtcggggctaaaaccggccgcgatgggattcacggggccacttttgcatcggatgaatttgcagatggcaaggcgacccaacgctcagcagtccaagtgggtgatccgtttatggaaaaactattaatggatgcttgtttggaattaattttgaagcatccagattggctagtcggcatccaggatatgggtgcggcgggcttagtttcttcaacagcggaaatggctgaaaaggcaggtactgggatgattctcaatcttgatcttgtgccacaacgagaaacagagatgtccgcttatgaaatcatgctttctgaatcgcaagaacggatggcgctttgtgttaaagctggtcatgaaacagatgtggttgccttgtttgaacgatatgatctggatgcggtccggattggtgaagtgactgagagtcaacaatatcaattgtggcatggtgggcaattagtggccgatttgccagtggcggctttaacgagtgatgcgccgatttatcataaagcacaaactgaaccagcacgcatcgctgaatttaaagcgatggcgccttatcagccggtgattaatgatgttaaacgaacatggctcgatttattgggccaatccacgattgctgacaaacgctcgctatacagccactatgatgcacaagtgaagaccaataccgtcgttttaccaggaagcgatgcggcggtcgtccgaattcgtgggactaaaaaagcgctcgcgatgacgacggattgtaacgggcgttacttatacctcgatccaaaagtcggtgggcaagtggcagttgccgaagcagcacggaatatcgttgcggcagggggccaaccactgggaattacggattgtttgaactatggcaatccggaaaagccagaggtattctgggaatttgatcaaagtgcccaagggattgcggcggcctgcgaggttttcgatacgccggtcatctctggtaatgtttctttttataacgaattcaatggcgaagcgatttatccaacaccgatgattgggatggtcggtttgattcgagatacagccgacatcacgacgcaaggttttaagtcagcgggggatttaatctacctcgttggccagacggatacgaatttagcgggttcggaactccaaaatatgttgacgggcaaagttgcaggacgattaagcggcttttcgttagccactgaaaaagcgagtcaagattgcgtcttagcagcgattcaaaaggggtgggtgactagtgcacatgatttatcagagggtggttttgcggttgcgttagccgaaatgacttttaaagaacaactcggctgccgcgtgcaagtcccccttaatcaacaacagttatttgttgaaacgcaatcccgctttatcatcacggttcggccagaaaatcagacggcgtttgaagcgttctgtcaagatcaggcgcaattaattgggacggtctcggccacgccaattatgcaagtgcaaacgactgaatcaactgttgagttatcggtgactgaagcgaagttaagttgggagacggcgataccatgtcaaatgaaataaaaagtttaaatgaagaatgtggtgtttttgggatttggggtagtccagaagcaaaccaaatgacttattttggcttgcatagtttgcaacatcgtgggcaagaaggtgccggcattgtcactaatgatcacgggcacttaatgggttatcgcaatcgtggtttgttggcggatgttttccgcaaaccggagcacttaacccaactaaccggggacgcggcaatcggtcatgtccgttatgcgaccgctggtagtcacggtttagaaaatattcagccgttcctattcgattttgcaaccgatcaattcgcacttgcacacaatggtaatttaaccaacgcggtcacactgcgccgcatgcttgaacaatcgggggccatcttaaaatcgagctctgattctgaaattctgatgcatctgattcgacgtgcagaagggcctgatttgcacgcgcaaattaagacggcccttcaacaaattcgtgggggctttgcctacctattattaacgcaagattcattgattgcgatgcttgatcccaacggctttcgaccactctcgattggacgtttagcaaacgggggctacgttgtggccagtgaaacctgtgcgctcaataccgttcaagcaacttttatccgagatgtgcagccaggcgaaattgtgacgattgatgcggacgggttacattctgacttcttcacaaccgaaaccacgcattcaatctgttcaatggaatatatctactttgctcgcccggattctgatatctgtgggattaacgtccatgcggcccgcaaacgaatggggaaacagttagcacgcgaaaccgcagttgatgcggatatggtaattggggtgccgaattcatcgttatcggccgctagtggctatgccgaggaaagtggtttgccgtatgaaatgggcctcgttaaaaatcaatacgtggggcggacgttcattgaaccaacgcaatcccttcgtgaacaaggggtaaaccgcaaactcgccgtggttaaaagtgttgtggctggtaaacgaatcgttttagtggatgactcgattgtgcgtgggacgaccagcaagcacatcgtgaaacgtttgaaagaagcgggcgcattatccgtgcatttgcggattgcgtccccaccattgaagtacccttgtttttatgggattgatattcaaacacgtgatgaactgattgccgcgcatcaaagtattgctgagatgtgtgccacgattggcgcggattcacttggctttttgagtgaacagggattaatcgacgcgattgggttacagcaagatgcgccgtattccggattatgtatggcgtatttcaacggcgactatccaacgccactttatgactatgaagctgcctatcaggcaagtttaaaagcagataaggagcaacaatcatgacaaatgcttaccaaaaagccggggtggatgtgacagccggttacgaagtggttcgtcggattcaaaagcaggtcggcgcaaccaatcaaaatattggtcgcttcggtggtcagtttgccttagcgatggggcagtatgaaaatccggtgctcgtttcaagtaccgatggggtcgggaccaagttgatggttgcttttgcagctgatgcacacgcgaccatcgggattgattgtgtcgcgatgtgtgtcaatgacattgttgcccaaggcgctaagccactttatttcttagattacttagcggctggtcaaacgcagccggataagatcgaacaaattgtcagcggcgttgttgcaggctgccaagctgctgacatgctgttaatcggtggtgaaacggccgagatgccgggtatgtatgctgaaaaacattatgatttagcgggttttgcagtcggaattgctgatcaagctcaattaattactggtgaaacgattcaaacaggggatgtattaatcggaatcgcgtccagtgggattcattcgaatggctactcacttgtgcgccaaattttcttcgaacaacatgggttgtccgtcgacagtcacttacccgaattgcctggtcagacactcggtgaatggctattaacaccaacgcggatttatacacaagcatgtcagccgttgatcgaacaaggctttattaagggcgcggcccacattactggtggaggctttattgaaaatataccgcggatgttgcctgacaacgtgatggccgaaattcaattgggaacatggccaagcttaccgatttttgcggcacttaaacaatatgggcaattggatgcactcgagatgtataacatttttaacatggggatcgggatggtcttagccgtcgcaccagaaaaagcggcacaagttctcgcccaattgaacgctgaacaagaacaggcttaccgaattgggtcggttaaaccgcgacaagaaaatgcaatagaattggtgggttgatgagatgaaagtggcgatttttgcttctggaacgggttctaactttgaagtacttgcagatgatgacgccttaaaaaaagcgggcatggagattatgaacttagtgtgtgaccagccgggcgcaccggtgattgaaaaagcgcgccaacgaaatgtaccggtgacggtcatccgcttaagtgattatgatgatcgacaacactatgaagcagcaattgtcgcgctgttggcaccgttacagttggattatatattgctagcgggttatatgcgggtgattaccccagtattgttgcatacctacccacaacggattatcaatattcatccgtcgttactaccggccttttctgggttacgaagtattgaacgggcctatgcggcacaagtggctgaaacgggcgttacgattcactacatcgatgaaggtgtcgatagcggtccgatgattgtccaagcaaaagtaccattgttgcctggcgatagtttagccgcattggaacaacgcgtgcacgatacagagcacgcgatttatccgcaagttgttgctgaattaattaaaaaccaaaatagaaggagtaattcaatcaatgaaaagagcgttggtcagtgtttcagataaaacaggaattattgaatttgctaaaggattagtagcagctggttacgaggtgatctcaacaggcgggacattcaaggtattacaagaagcgcaagtaccagtaattgcgattgatgaagtcactcatttcccagaaatgttggatggacgggttaaaacacttcatcccaatattcatggtggcttgcttgccaaacgcgacgaaccaacacacatggccgctttagcagcccatgacatccagacaatcgatttagtttgtgtcaatctgtatccttttaaagaaacaattcaaaaatcagggattactgaagcgcaagctgtagaacaaattgatattggcggaccttcaatgttgcgttctgccgctaaaaactttaaatcagtgtacgtggtcgttgatcaacaagattacgcgcaagtcctcgaacacgtcgtcgatgaggggcaagctgcggttgattaccgtcgttatttagcagccaaggcattccgccacacggcagcttatgatagcttaattgccggttatttaaccgaagcagtcggcatcgaattccctgaaaaattaacacgttcatacgactttaaacaagcgttgcgctatggggaaaatgcccatcaaaaagcagcgttctatcaaagcagtttaccaacggctttctcgattgcctcagcggtacaattacacgggaaagaattatcgtataacaacattaaagatgcggatgcggcggttaaagtggtctcagaattcagcgaaccttgtgtggttgcgatgaaacatatgaatccgtgtggcgtcggcttgggtgcaaccatctatgaagcttggcaaaaagcctacgcggccgatccagtatcgattttcggggggatcattgccttgaatcgtgaagtggatgttcaaacagccgaagaattacatagtttattcttagaaattatcatcgcaccaagctacaccccagaagcgttagccattttagaaaagaagaagaatttacgcgtcatgacgcttgattttgaggctgctaagcaagcggattgcttcgaaatggtttctgttttaggcggcttactcgtgcaagaacgtgatcgggtgactgatcaagcatctgaattgaaggttgtgacggacaaaacaccaacggctgatgaacaagctgcgatgttatttgcccaacgtgtggttaaacacgttaagagtaatgctatcgtggtcgcaacaaaggaccaaaccctcggcattggtgcggggcaaatgaatcgggtgggctctgtgaagattgcaatcgaacaagcggaagccaatggattaaaagcaccgttcgtcttagcatctgacgcctttttcccaatggatgacagcgttgaatacgccgcagaacatggtgtgacagctgttattcaacctggtggttcgattaaggatcaagattcaatcgacatggccaaccaaaaaggaatcagtatggtgacgactggtcgccgtcatttcaaacactagccaataggaggcaaatcatggatctattagtaatcggtagcggcgcgcgtgaacacacgattgcgcgtgcgctacagcagagttcaactgttgcaacggtctattgtttgccgggcaatccggggatgcaattggatgggattcaaacagttgcgattgagatgactgactttgcagcgatgattgcctttgcgcaggccaaaaaggtcgcctatacgattgttgggcctgaacaaccgttagtggctggcgtagtggatgcttttcaagacgctggattagcgatctttggaccgcgtaaagcagctgcggcattggaagggtctaaaactttcgccaaagaaattatggcggccgcgcatgtgccaacggcggcttatcaagcctatcagactgtccaagcggcactggatgccctcgatgacgttcgttatcccgttgtgattaaagcggatggtttagcggctggcaagggcgtcgtcatcgctcaaaatgacgtgagcgcgcggcaaactgttcaggcgttctttgaacagggcgtgccccagttattgatagaagattatctcgaaggtgaagagttctcgctgatggcgttggtggcgaataatcgcgtctatccattaccggttgctcaagatcataagcgcgcctttgacggggatcgtgggcctaatacaggtgggatgggcgcttattgtccagtaccccagattagtgaccaatgcgttgcagaagcggtaacgactattttagaaccgattgtggcaacgatggctgaacgtcaaacgccttttaccggtgtcttgtatgcgggcttaattgccacacaacacggggtgaaagtgattgagtttaatgtgcgctttggtgatcctgaaacacaagtggtgctaccacggatgacgggcgactgggcccaagtttttgcacaattattgaagggggaaaccccaacgttacagtggcaattatcaggcattacgttaggtgttgtggtggcttcagatggttacccgacacaatcgacaacgccgtttgttttacccactttgcaacaatttgcaaaacgcaacagcacatttagtttcgctagtgtcgcagaacaagccaatcaattggtcagcgctggcgggcgtttgtataccgctagttattctgctgagacgctaggccgagctagtcaacaggtctatcgggatttagcacaactcgctttaccgacgactttttaccggcaagacattggatttcgaacgcaagtgaaataaccgagtataaatgtttgcttacttttgataagagaaccatgataaaggtattcaattattgaaagaaggaatctatcatgggatatcatacaagtgaagcggaaaatccaatcgatattttaaacttagcgtcgttagaaggacgcgtgaaagaacgaatggaagctggcgcgtttggctatatccgtggcggtgctgaagacgaatggacgatggctgaaaataccagtgctttcaatactaaaaaaataatgccccgtgtgttaaaaggcatcgatcacgctgatttacatactaaattatgggatattgatttaaaaacgccgattattcaagccccctcagcaacccaagggttagcacatgaaaaaggggaagtcgacactgctaaaggggtcgcagcggctggttcgattttctcaattagtacctatgccaatacattggtggaagatgcagccgcagcggctcctgatgcccccaaatttttccaactctatatgagtaaagatgatcaattcaatgagttcttattgaaaaaagccgttaaggcaggtgtaaaagccattattctcaccgtcgattcaacattgggtggttatcgtgaagcggacatcgagacgcaattcccactaccaatgcctaatttagcagcttatagtaattctgacggtgctgggaagggcatctctgaaatttatgctgccgctaaacaaggattagtaccagaagatattcaaaagattaaacaaatcacaaatttgccagtctttgttaaaggcattcaatcaccagtggatgctgaaattgctattcaagctggtgcagatggcatctgggtttcaaatcacggtgggcgtcaattagatggcgggcctgcttcatttgaagtgttgcctttaattgcgcaacaagtcgcaaaacgcgtcccaatcgtttttgatagtggtattcgccgtggtgaacatgtctttaaagcactcgcaagtggggctgatttagtggccattggtcggccaattatttatggtttaaatttaggtggcgcccaaggggtacaatctgtttttgaacacttaaaccatgaattatcgattaccatgcagttggctggtaccaagacaattgatgaagtgaaagaaacaaccttacttgattaatatggtatactgagagtccttggcaggggcactaaaaaaagcggttcaactcaatgatgagttggaccgctttttgacgttaacctaattatttaagatgggggagttcagctaataataattcgctagcgactaatccgagtaggctgacaataacgtacacccagtgagaaccactaccccagctgaatagataagcatcaacaccaactaaaatgataaagagcacgcaatttgtgattaagccgattttgaaagtcaattgactagcaatgacggcgaataaaacgattgaaatgaaaataatgaagaatgcagaaatcaaagtgacgaccacctaacgctatccgatttgaaatactacgctcattttactataaccgcagacgaacaacaattaaatttgtgggggataaagtttactttttgggtgttcgttaacagaatcttcaaatttacagtgtacactaggggatattcaactgatcaagggccgttatcaagccgattaatggacagacttttcactgagcggctatactatcgacaggtgaatttaattaaaagattgggggaactatcagatggttcgtgagacagatttacgagcgcaagatccacgtgttcaacgaacaaagcaacaattacgtcaagccctcattatcttgctgaaagacagtacgccaaaggggatttcgattcaagcaatcaccaagcaagcggcaattactcgcgggaccttttatctccattatgaagataaagtggatttcatccgaaccgcggtggccgatttggtggccgatttttatcagcaagtgactgtagtggtcgatcagacatatcgtcaggtcagtttacaggcactttttgaatatgttgaacaacaacaagctgcttttaaagtgttctataaaaatgaggcgacgcttcactttcaggcacaactgactgaatcaatgcgccaattaatgcaggattacgtggctaagcgctataatcagacttcacaggctgatcaaattgagatgagtattacgattgattatttagcgggggccagtttagcgttggcctttaagtgggtcaatgacgggcttgtgtattcaccacgctacatggctaagatgttataccaattggtacaaacacctaatacgacgttcgatgtcgcacaattttttgtcgaggcgtaataaagcattgactcgccctgtgatattcgatataatatgaacgttgtaattgtgagctccacagctgcaaccgcgcatactaaggcattaagtactatgattagtcaccttagttggcgagtctaagaaaaaataggaggtgcacacatgtacgcaattatcaaaacaggtggcaaacaatataaggtagaagctggtcaagcaatctatgttgaaaagttagccgcagaagctggcgaaaaagtaacttttgatcaagttattttagttggtggtgaaacaactaaggttggtacaccaaccattgatggtgttactgttgatggtactgttgaaaaacaagggcgcgaaaagaaagttgttactttcaaatacaaacctaagaaacacagtcatcaaaagaagggtcatcgtcaaccatatactaaagtgatgatcgacgctatcaacgcctaattgagggaaataagatgattcaagctgactttacggtcaatgccgattcgaaaattatttcttttcaaattacgggtcatgccgactcgggtccttacgggagtgatatcgtctgtgcagctgtttctgctgtctcaatcgggacaatcaacagtttgcaaaagcttgctggttttgaaccagaggtagaagcagataacctgaatggtggtttgttaacttgtcagattccggcaacggtttcgggccaagctttagcgacagctcagattctcttgcagaatttgcagttgacgcttgaagatattacgcaacaatacgggcagtacattcaagtacaaacaaaacgtaaatagacagttaataaacaggaggtgcatttagatgttacaaatgaatttacaattcttctctcaccataagggtggcggttcaacaactaacggccgtaactctgcaggtcgtcgtttaggttctaaacgtgctgatggccaaactgtaacagctggttcaattctttaccgtcaacgcggtacaaagattcatccaggtgaaaatgttggtcgcggtggcgatgacacattatttgctcttatcgaaggtgtcgttcgtttcgaacgcctcggtaaaaacaagaaaaaggtttctgtatacgctgcagaagctaaataattttttaaacacccactttgtgtgggtgtttttttgtgcgagagaagcggggctgtcgtcacattctaaacgtgttccatcagtcatatctctccggttaacccagactgatgtcacactctgtttgtgtaaatccagttttactggtatactaattactcaggcaacaaaccattgacaatctaaaagtgagtgttcagatcgacttttgcttgattgaatacgctaaaagggattggcgggtgccggtccctttttttatagctacttttagggataaaaggctagaaatacttgcttttgagcctgatttcttgctatgattaggacaatggcatacttatataatgctcggaggataaacaatgttatcagtaaatgattttaaaaatggcttgaccattgaatttgacaacaacctatggcggattgttgaattccaacatgttaaaccaggtaagggtggcgcttttgtccgctcaaaacttaagaatttaagaacgggtgccaatcaagaaaagacattccgttcaactgaaaaagttgaaaaagcaatcattgatacaaaatcaatgcaatatctttatgcagatggtgacaaccacgtcttcatggatactgaaacttacgaacaattagaattaccagcagcacaaatcaatgatgaattgaaatacttgaaagaaaatatgcaagtttctatcatgatgtatggtagtgaaaccttaggggttgaattaccaaacacggttgatttagcagtggctgcaacagaacctggtgttcgtggtgatacatcttcgggtggtactaaaccagcaacacttgaaactggcttagtggtccaagtaccgtttttcgttaacgaaggtgatttgttaacgattaacacatctgatgggagttacatctcacgggcataggctaaattagcaagaacttgttaggaggggtttcgatggcagaagaaacaaatattgtacttgatacacaagaaaatgcattgggcaagattcaaatggcacctgaagttgtggaagtgattttagggattgcagcaagcaagattgatggggtccaccaaatgcgggggacgttatcatcatccattaacgaattgtttggtcgttcgaatcacggtaaaggggtaactcttaaggtgattgatggcaaagtgaatgcggatgtttatgtttatctgaactatggtgtttctgtgccgaaggttgcccttgcgatgcaagaagcccttaaagaacaattattgttcatgactgatttagaactagcagaagtcaacgtacacgtggtgggcgttgtcactgaaaaagcaccaaaaattattgatccagatgacttatttaacgatgaaacacctgatcaaaatggagaccaatcttaatgcctaattttaaccgacaccaaattcgccaagctgcatttcaagtgttgtttgcgttaaatgctaatgacacattagaattggcagatgcttaccaagccgttttaaccatggatcaattcgatgctgaagaagttgaagaagttgctgttccagactaccttgccttcttggtaacgggcgtcacagaacatcaagcagaattagacgccgctttaacgccatacttgaagaagggctggcaactatcacggttagccaaaccggatttaattatcttgcgtttagggttgtttgaaatgcaaaattcaacagaagcacccgataaagtggcgttgaatgaagcgctcgaacttgctaaacaatttacagatgatcaagcaaaaggttttatcaacggcgttttatctaaattcgttgaagcttaattagtaaaatacgaacgaaatcacttaaaacacgttaaaaagtatttttttagcgtgtttttttgaatttaaacggtcattatcagctgataacccggaattaaccgattaactatgctaaaatagaaacatcaaatatcgataaataggggttgttaactttggaattactagatggtcgagcacttgcaaatgaattaacacaagcacaacaaatgacggtggcaacactcaaacaacaaggggtaaccccgaaattagtggtcgtcatggtgggtgatgatccagcaagtgcgatttatacgcaaagcaagcaaaaaagagcgactaaaattggcatggcatctgagttaaaacgcctgtctgctgaaacaacggaagctgatttattagcggttgttcgccaactaaatacggatgaaaccgttgatggcattttagtccaattaccattaccaaaacaaattaatgaagaccatattatccgggcgattgacccacaaaaagacgttgatggttttagcccagtcaatattgggcgattatggcttaatcaaccgggcttagtggcctgtacgccaaatgggattatgcgcttattggcagctcacgatattgacgtggctggcaaaaatgtcgtgattgttggccggagtaacatcgttggtcggccattggcagctttaatgctcaatgccaatgccacggtcacgattgcgcacagcagaacggcagacttaaaagccctaacgaaaacagccgacatcttagtggcggccatcggtaaaccacacttcttcggcattgaggatgtcaaagaaggggcggttgttgtcgatgtcggcattaatcggcttgaagatggaacagtcaccggtgatgtcgattttgaagcccttaaatcacatgttagtgcgatgacgccagttccgcgtggcgtggggccaatgacgattacgatgctcatggatcaaacgattgagattgcaaaggaacgtgctaaacgtggttaaaccaacagactatttaacagtcaccgcattaacgcagtatttaaaggctaaatttgaacgcgatccgtatttggatcgggtttatttaaccggcgaaatttcaaacttccgcttacgaccgaatgcgcatcaatattttagtttaaaagataataaagctaagatcagtgccattatgttcaagtccgcttttgaaaagattaagttcactcctgaagaggggatgagagtgcttgttgtgggccggatttccttatacgaagcaactggaaactatcagatctatgtggaacggatggagccagatggtcttggtgcattgtatcaagcctatgaacagctaaaagctaaattatcggctgaaggcttgtttgatgcaccaaagcaactattgccgcgctttccaaaacggattgcggtgattacgagtccttctggggctgttattcgcgatattataacaacgacgcaacgtcggtatccaattgcccaactcgtcttattcccagcggtggttcaaggtgacggtgcggctgatattttagtcgatcgactgaatcaagttaatcaacaaggggatttcgatacaattatcattggtcgtggtggtggttcgattgaagatttatggccgtttaatgaagaacgcgttgcgcgcgcgattgttgccagtcagattccggtgatttcatcagttggtcatgaaacggacacgactattgctgatttagtggcggatgtccgggcagcgacaccaacagcagcagctgaattagcaacaccggttttgacggacgaagtgttgaagttgcaacaacaacgtttgcggttatatcaggcattttcgaaaacattggcattaaacaaaaagcaattggtccacttacagaacagttacgtcttaaaacagccgcaacgcttgtatgacggctatttacaaaatgtcgatcagttgcaccgtcgtttattgttggcgcaacaacaacgcttacagactagtcaacagaatgtacaactcttgcagcaacgcctgcagtcgcaatcaccaagtggtgcgattcaacaagcacaaagaatgttgactgataccgatcatcgtttgaaacgagcaatcgagagccttgtccaaaatcggcggcaacaggctggacaagcggtggcagccttggatctcgtaagtccgttgaaaattttgggacgcggatttgcttatgtaacggatgataatcaaaatgtaatgaaaaaaacgaccgattttacgatcgaccaatcaatcgagttacatgtccaagatggcctcgtgaacgcgcgtgttacggccactcataaaggagacgaataagatggcagaaaagaaattaacatttgaagagaacttagcacaattggaagcaattgtgaatgaactggaaacgggcgatgtgccacttgaaaaagcgatgactgcttttcaaaagggtgttaaattaagtcaaacattagaagaaaccttaagtaaggctgaaaaaacgatggccaaagtgatggcagataatggcgaagaagtcccattggatgttgaggcacaagaataatggttgatttcaaaacgttcgcgcgccaacaagtgcccgcatttgaaacctatttgactgagcaacttgcccagattgaagaaccaaccttgcaaaaagcgatgacctattcagtgatggctggcgggaaacgtctccggccacttttggtatttgcggtgcttgcaagtgtggggcgaccgattaatcaaacggcgtatcgcgtagcgggggcattggaattaattcatagctactcattgattcatgatgatttaccggcgatggataatgatgacttacggcgcggtcaacctacgaaccataaggtttttggcgaggcgcaagctattctagccggcgacgggttattgacacttgcatttgaatggttaacgacgaccgatttgacgactgatcagcagagccgtactgttcgattattggcgcaagcagccggtccaagtggcatggttgctggtcagattgaagatatcgaaggacaaactaaaactttatcgttagctcaattgaaacaagtccatcagctcaaaacgggccgtttgattgaatgcgcggtcggcttaggggcgattttggctgatttatccgatgaacaaatggctagtttacagctttttgcgcaaaattatgggttggcatttcagatccaagatgatattttagacgtgacaagcactacagaagcgatgggcaaggcggtccataaggatgctgacgaacataagaatactttcccaggcttattgggcttagctggtgcaaaagacgcgttggatgagacttgtcaggccgcgcaaactgctttaacggatttatccgggttagataaagcactattaaatagttttttaaactattttaatgaataggagaacagatgaaaaaagaacgggtagacgtattattagtccaacagggattatttgattccagagaacaagcaaaacggtctgtgatggctggtgaagtgtacggtaaaaatgatgaacgaatcgacaaaccgggcgaaaaaatcgacgctgaaactgttttaagtgtcaaagggcgtaagattccgtatgttggccgaggggctttaaaattggcgaaagcggtcgaggttttcaacatcgatttacaggataaaatcgcacttgatatcggttcttcaacagggggctttactgatgtggcgcttagaaatggggccaaactctgttacgcactagatgtgggttataaccaactagcatggaaattgcgcgaagatccacgcgtcgtcgtgatggaacgggttaattttcgttacagtcaaccagaagatttcaccaatggtctaccagattttgccatgacggatgtttcgtttatttcgttacataagattttggtgccgttgaaacccatcttgaaaccggactgcgaagcggttgctttaattaagccgcaattcgaagccggccctgaaaatgtcggtaaacacgggattgtgcgtgatccgaaagtgcataagatggtggttaaagacatcgttgattttagtttagcgacaggctacgacgtgctagggttagatttttcaccaattaaaggtggcgaaggcaatattgaattcttgattcatctacggaatacgacggctgagactggaacgatggccccaaacatgaatattgatacggttttagagaatgcctatgctgctttgaaacgaccaacgggaaaatagtgtataaaactttgtattttatgtataaatgcgctatcattgaggaatagaataatttctcacatgaagagggtgttttaatgcgcaaggtagatcggcaacgactgttaaaaaatttaatccagacccatgagattgaacgacaagaggattttgtgaagctgttacaagcggaagacatcgatgttacgcaagccacgatttcgcgggatattaaagaaatgcagctcattaaagtgccaaatgcggacgagggctatcactatagcctaccgcctgaaaagaaattagacgttaaagaaaagttgcgtcggattttacgtgacgcctatattacgcataaccaacaagactattttgtcgtgattaaagccttaccgggtaacgggacggcaattgctaatcttttggatcaaatgcagctcagtggtgtatttggtacaattggcggcgacgacaccgtgttggtgatttgtaaatcagaagaaaatgctaaacagtttacgaagtttattgaagacttgctaaagtaatttggcaagtttttttagcatcaagagaaacgaaagggggatgatcagatgttacaagagttggtcattcacgattttgcaattatcgatcagttagcaattagttttgaagaagggatgacggtgctctcgggggaaaccggagccggtaagtcaattattatcgatgcagtcgggttactcgctggcggccggggttcacaagactttatccggactggtgctaaaaaagcgacccttgaaggcttatttacgatgacgcctaatggcgcaaccgccgcagtattagaccagtttggcattgaacacgacgaacaaaccgtcttattacagcgtgatttagccgttaatggacacaatgtttgtcgggtcaacggtcatttggtcaatacaaccactttgaagcatattggggaaaccttagttgatattcacggtcaaaatgaacaccaagaattaatgtatccagatcgccacttggggttgttggatgaatttgcgcaccaaaagttaacaaccgcgaaggcagcctatgccgaaacctatgctgcctatcgtaaagcacagcgtgccttgaagcaaaaacagcaaaatgaacaagaatgggcccaacgcttggatatgctgaaatttcaaactaacgaaattgatgcagcccaattacaggctgatgaagaaagcaagttagtcgaagaacgagccaaactaatgaactttcaaaaaattaaccaagcattgcaagccagtcacacgattttagcaggagaagacgggaatgcgttagaccaaatcgcagttgcaatgaatcagatgcaagaaattgctgaactcgatccagaattcaagcgtattgcggacagtctgcagactggttattacacgttgcaagatagtagcattgatattagtcgggaagtttcaaacttagaatgggatgaagcacggttagatgaaatcgaacaacggctagaaactattaataatttggaacataagtatggtgattcaattgccgaaattctcgcttatggtgaaaaaatcggggctgaactagcagcgatgcaagcaactgaagcgaacgcaagtgagttggagcagcaattcacgcaacttgaacaacaacttaggacaaacggacaaacgttgacgcaattacgccaaaaagcagctaagcaacttgaaaaagcggttcatcaacagttaaaagcgttatacatggaaaagacggtctttaaagttgaattcttgccaaatgaacaggaacagttcatggcttccgggatggacaaagttgaattttacattcaacccaaccctggtgaaaaactacggccactcgctaaaattgcttctggtggggaattatcgcgcttgatgttagcccttaaaacgattttctccgaatcacaaggcgttactagcatcatctttgatgaagttgataccggagtgagtgggcgtgtggcccaagcgattgccaataagattagtgaaattggccaacattcgcaagtgctctgcattacgcatttgccgcaagtcgcagcaatgagtgatcatcaatatcaaattcaaaaacaagtgaaacaaaatcgaacagaaacgtccgttcaaaaagtaaccggtaaacaacggattgctgaactggcacggatgttagcggggactgaagtaacagagttaactttagaacatgccgaagaattggtggcattagcggaaacggctaagcaaagtcgccgacattaaaataagggtgcagccaaaatatttttttggctgcacccttatttttttgcttaatttttcttttgaatgtaacgaatttgattgcaaaggacaatcttgtagaggttcgaacgactctcttttagcagatacttgttcgcactgagttgtttaaccaagcgcccggtcacttgttcgagatgatcgttaacattgaattgcaccgcaacatggtagtggcgttcaaacgcttgggtcataaataattgaatctgagcaggttgcatttggggttgttcaacaaaagcagtcgcttctggtgtaagttcaaaaaagcggtgatattgtttaaccaattgttgactgagtccgctaaccgttgcttgtttaaattccatgatttcatcctccgaacacttgtttgtgttttcattatacgaacaaacgttcagaattgcaagcggcattttttgatttttttcgtgtataataggatgaactgatagaaagggtgatttgatgggcaaaattgaatatgaaattatggcagaaatcggtgtgttgagtgaaaatccagctggttggcgtaaagaattgaatttaatctcttggaatcaacgtgcaccaaaatttgatttgcgagattgggcaccggatcatgccaaaatgggtaagggtgtgacgctgtcaaacgacgaaattgcgtccttaaggttaattttaaatgagatggaaacaaagtagacttgaaatttcccgccaaatagtgcagaatagactttaactattttataaaagaagagggaattacgtagatgtccaatcgaggaatgttgatcgttttatcaggcccatcaggggtcggtaaaggaactgtccgtcaagcaatgctagaagatgaatttcgtgattttcactattcagtttcgatgacgacgagaaagccaagaccaggcgaacaagatggtgttgactattattttgtgagcaaagaagaattcgagcaagaaattgcaaatgatggtatgctagagtatgcacagtacgtggataattattatggcacaccgatgaagtatgtgaatcagacactagactcagggcgagatgttttattagaaatcgaagtccaaggcgcaatgcaagtgcgcgagaagtgtcccgatggcgtcttcatcttcttgacaccacccgatttattagaattgcggaatcgaattcaaaaacgcggcacagacgatcaagcaacgattgataagcggatgcaaaaagcagccgacgaaatcaagatgatggaaaattacgattatgctgtcgtcaacgacgaaattccaaatgcggttcaacgaatcgaaaagattatcgaaagtgaacacttacgagtgccacgtgtgatcgaccaatacaagaaaatgataggggaataataatatgattgtatatccttcaattgataagttactagaaaacgtgaactcacgttactcattggctgttttagctagcaagcgggcccatgaaatcgaagccggtgatattaagatgttatctgaatacaaatcacctaaaacggttgggatggcaatggaagaaattgctgctggcaatgtcattattgatcctgattcattgatgcttgaaaaagatgctgaaaaaatggataagctcgctcaaaaagacagcgaataagaataattaaagaacctgcatgtttagtttattcatcgatggatgtttaaattaaagtgcagtttttttagttttagggggttttgaaagtggatttaacgaataaacgaattgcagtttatgtgacaggtggcattgccgtctacaaagtggctaatttggtacgtggattgattaaagcaggtgctgaggtccaagtggcaatgactcaggcggcaaccgaatttgtcacgccactgacgtttgccacattaacgcgtaaacccgtgttaactgatttgtttaatcaagaccaaccggatcgggttgcccatattcacttagcggattggactaatctggcggtgattgctccggcgactgctaatctaatcgggaaactcgctaatgggattgctgacgactttgtctcgaccgccttgttagccactaccgcgcccaaattaattgtgccggcgatgaatgaacatatgtggtttaatccagctacccaacggaatttaacccaacttaaagcagatggctatactgtcatggaaccggataccggctttttagcggaaggctatgctggtgtcgggcggttccctgaagaaaccgcgattatggcagaagttgcgcaacaattcggaccgcaacggttaagcgggcagaacgtggtggtgactgccggtgggacacaagaaccaattgatccggtacgctacattggcaaccggtcttctggtaaaatggggtatgcagtggcccaagcagccgtgacgatgggggcgaatgtgatcctcatcagcacgcgtccagaattgccagtcccggctggtttgcacaaaataatttacgttgaaacggcggcgcaattacaaggcacagttagcagtgtctttgaaggggccgatgttgtggtgatggctgcggcggttgccgattttaaaccggcccaatatgtcacgcacaaaatcaaaaaacaaccgaacacaactgagatgcagttaactttagaccgtaccccagatattttggcgacgcttgggcaacagaagacgcatcaattcttggtcggattcgcggcagaaacagatgatttactacaaaatgcccaaaccaaactagcagctaaaaatgttgatttactcgtggcgaacgatgtcagtcagcatgatcggggctttggtgttgatcaaaatgcggttacgcttttacaaccgaatgcagcaccggaaacattagcgttggcggataaaagggtgattgcgactcaaattctagaacgagttgctgacttgttagattaactaaaaaggaggatttagatgccacaaatcgcaaaagtgattgtcgatgtgccgacgatgcaaactaatcggccatacgattaccaagtaccggatactttattagacagtattcaacctgggatgcgtgtggcggttccttttggcaaaggtgatcgattaattcaaggctttattttgtccattcaggatcaagccaattttgaggggcaattaaagccgattacggcggtcattgatttacaaccggctgtgaattcagaattacttcaattatcaagttggttggcagagcggacctatgcctttcagattacgtgcttgcaaacgatgctcccaagtgtgatgcgtgctaagtattctaagaccgcgcaactagttgatgaaattgatccagccttacaagcaagcctgttcaatggtaacgacgaattaacgtttgaccagtcgctagatcccgaaaagttaaaacaattgatgcagttacaacgccaagggaaaatcgaagtggtctaccatgtcgatgatcgcgcccgcgtgaagcaattaacggcgattgaaccggcattatcgtttgaacagttagaagaagcgcgggccggcttacgtaagtcagcgcaaaagcagagtcaactcattagttatttacaaagtttaattgatcagcccaatcccttattaaaggatgttttggccaagacgacttttacccgggagaatatcaagacaggcgccgacaaaggttggttacgccaagttaaagttgaagcttaccgaaatccttatcctaaaaccgtcacaacgacgcaaaaaatggcgttgactgatgaacaggctgatgcggtagaagccgttgtagcggctactaaggcccaatctgatcgggtttttctagtcgaagggattacgggcagcggtaagaccgaagtctatttacaaacgattgatgcggtcttgcaacaggggaaaactgcattaatgttagtccctgaaattgctttgaccccgcagatggtcaaacgcgtgaagggtcgctttggtgatcaagttgccgttttacatagtggcttatccgaaggtgaaaagtatgatgaatggcggcgaattgaacgcaaagaagccagcgttgtcgttggggcgcgctcagccgtttttgcaccattggagaatattggtgtgattatcatggatgaagaacatgaagcttcctataaacaagatgaaagtccgcgctatcatgcccgcgatgttgccatctggcggagtcagtaccatcattgcccagtgattctcgggagtgcaacaccatcgcttgaatcgcgtgcccgtgcccaaaaaggcgtctaccaactcttgcgcctgacgcaacggattaatcaacagccattaccggcagttgagttggttgatatgcgcgaggcgatgaagcaacaagccagcagcaatttttcacctgcgctattagatgcgttaaaggatcggttgcaaaagggcgaacagagcgtcctcttattaaatcggcgcggtttttcatcctttatcatgtgtcgcgattgtggctttgtcttgcagtgtcccaactgtgatatctcactcacgttgcatatggatacgcactcgatgaagtgccattactgtggtcatgaagaagcaattccgcggacttgtccaaattgtcagagtcgccagattcgctattttggaacgggaacacaaaaagtcgaagcagaactccaagagctgattccaaatgctcgtattctacgcatggacgttgatacaacccgcaaaaaaggtgcgcacgctaaattactcaaacgctttggcgaccacgatgccgatattttattaggcacgcagatgattgccaaagggcttgattttcccgatgtaacgcttgtcggcgtgattaacgccgataccgctcttgggttacctgattttcgggcaagtgagcgcacgtttcaattattgacgcaagtcagtggccgtgctggtcgtgccgataaaatcggtgcggttatcgttcaatcttttaatccggaaaattacgccatccaatttgccaagcaacatgattatgaaggcttctatcaatatgagatggcagtccgccatcggggcggctatccgccgtattattttacggtacagttaacgattagccatcctgaagaagcgttggcagccaagaagagtttccagattgcccgtcaattacggcccgtcttatccgaccaagcgattgtgctgggtccgacgccgaagtcgattgcgcggattaataatcgttatttctatcaaattgtgattaaatataaacaggaaccacaacttcaggcgaaactcgccgagattctcgaaacgacccaaattgatacccgtcatggtttcaagattgggttggacaatgaacccctacaatttacttaaagtgagcgtgattgattaatgacatccatcgtatttatggggactccccaattttcagtaccgattttagaagcccttgtggcacacgattatcaagtcctagccgttgtgacccaaccagaccggaaagttggccgcaagcaagtcctacaacaaacacccgttaaagaagcggctgttcgcttaaacctgactgtttttcaacctgaaaaactcagtggtagtcaagaattagcggacgtgatggccttgcaaccagatttaattgtgacggcagcatatggtcaattcttgccaacgaagttattagaagccgctaagattgcagccatcaatgtgcatggttcactcttgcccaaatatcgtggtggtgcacccattcaatatgctgtgttaaacggcgattcagaaattgggattaccatcatgcatatggctaaaaaaatggatgccggtgatatgattgaacaagccagcattccaattgaagcttcagacgacaccgggactttatttgataagttaagttatgtcggtcgagatctattattgaagacattaccaagcattatcgatcaaaccgcgccccggacaccacaagatgaagcacaagtaacgtttgcttacaatattactaaggaacaagaacaattagatatcgagcaaccagcaacgcaactggtcaaccagattcgtgcgttacggccacaaccaggcgcttggttgccaattaatggtcaacggacaaaattatggcaagcaactgttgctgaaacaacgacggatcaaccagccggtgtgattgtcgctatcaacaaaaaggatttcgaattagcagccggcaatggcagtgttttgaagattaccgagattcaaccagctggtaaggctaaaatgccggtccaatctttcttaaacggggttggcaaacaactcgcagtcggacaacaagtggtggtgcaagatgcctaaaaagacaccacgctatttagctgttgaaattttaacggcggttgccaaacaaaacagttattcaaacttggccctcgaccaagtgattaaacaaaaccacttgaatccccaagatgctggttttttaacgcagctcgtgtatggtgtgattcaacatgaaatgacactcgattattacctagccccctttattcaaaaaccagctaaactggcaacttgggtccgccaagtcttacggacggcagtttttcaacaggtttatttggatcgtgttcctgaacatgcgattttttatgaagcaactgagattgccaaacaaatgggccatgctggcacggctaagttggtcaccgcaattctacggaaccaacaacggactggattgcctgatttagcagcaattgccgatccaatcgaacgcctaagtgtgacttacagtatgccgcagtggttagtggcgaagttccaccaagaattagggcaatcaaaattggaacacttattggcaacgattaaccaaccagcgaatgcgtccattcgagtcaatacccgtgttaattcagttgatgccgttttggcagacttacaggctgacgggttaacgattgaaccgagtgtaattgtagccgctggattagttgcccacggcggtcacttagccagcggtgaattgttcgaacaaggcgcgtatataattcaagatgaaagctcgatgttagtggcaccaagtttgcaactacaaccaagtgatcggatcttggatgcttgtgcagccccaggtgggaaaacgacacatatggcgacttatttggatgccagtcaaggggggcaaattactgccttagacattcatgaacataaagtccgcttgattgagcaaaacgctaagcgtttgcatgttgcagacgtcattgatgcgcgggcgctcgatgcacgcaaagtcggtgaacaatttgaacctgaaacatttgataagattttagtcgatgcaccatgttctggcttaggcttaatgcgacgtaaaccggaaatcaagtatggtcgccaagcagcagacttattgaaccttcaaaagattcaattggcgattttagaagccgttgcaccaaccttaaaagtgggtggtcaattgacttacagtacctgtacgattgtcccagaagaaaatcaacaagttgttgcggcttttgtggccaatcatccagaatttgaaatcgtaccagtagcactcgacaaaccattgccagccaatcaagcgacaccgtttgtccaaatctatcccgatgattatcaaacagacggctttttcatcgcttgtttaacacgacgggcttaaattattaattgaggtgaattcttatgaaagttgcttttcaaaccgatgtcggccaacaacgccaaaataatcaggactatgtcggcttttataccaataaaagcggtgcgcagtttgcgattgttgctgatgggatgggcggtcatttaggcggcgatgttgcttcagaaatggcggtttcccatattgggtacgagttcgaacgaactgatgataccgacattgaatccatggttaaatggttaattttcgaattacaaaaagaaaacaaacatattttagcgaaggctaatcagtatgatgatttgtttgggatgggcaccacgctcgtcgcagtgttgatttcaggtgccaattacttagttgccaatattggcgacagccgagtgtatcgcttccggaataacgaactccgccaattaacagaggaccattccttggtaaatgaattggtgaaacaaggggagttaaccgaagaagcggcaaagcatcatccgcaaaaaaacatcattacgcgcacattaggcgtttcgcaagatgtcgatgccgatgtaacaatttacgaatttgaaccagatgattatctattattatgtacagatgggctaaccaatatggtcgatgatgaacaaattaagaccacgctgatgacaccgacatcgctggaagaaaaatgtgcggcattaattcaacaagcaaatgatgccggtggcttagataatattacggcgttaatcttacatcaaactggtgaggagggtgcgcgatgatggagacaggctacgcggtcaatggccgctatcagattatccgtccaattggagaaggtggcatggccaacgtttatctggcccaagatctgattttggatcgccaagtggcggtcaaggtgctgcgacttgatttacggaacgatccgaacacggtacgtcgctttaaacgcgaagcacttgccacaactgaattgaaccaccccaatatcgtcagtatctatgatgttggtgaagaaaacagcatgcaatacatcgtgatggaatatgtgaagggaacagatttaaagaagtatatcgttgagcacttcccgattccttatcaacgcgtcgtcgatattatgacgcagattttatcagcggtcgaaaatgcccacgcgcacgatattattcatcgtgatttgaaaccacagaatatcttggtcgatgaagcaggtaacgttaagattagcgattttgggattgcgattgcgctcagtgaaaccgcgatgacccagaccaatacattactcggatcagtgcattatttatcaccagagcaagcacggggttcaatggcaacgaaacgttcagacatctattcactcgggattattctgtatgaaatgttaacgggtatggtgccatttgaaggtgaatcggctgtttccatcgcgattaaacattttcaagatgctgtaccacccgttcgagattatgatccgcggattccacaagctttggaaaacgttgtgttaaaagcaactgccaaagatccggacgaacgctacagtgatgttgggcaaatgaccactgatttgagtacctcattatcagctagtcgggcgcatgaaccgaaattcgtgccctcacaaggtgatatgggtgaaacaaaggtgattccggctcttgacccagaagggattacgcgccaaaacaatgcgccagaagccaaacccaaagatgagactgaagtaaaagacgatcagaaaaagaaacagccgcataagaagtcgaagcggaaatggtggtttgtggggcttggcgtagtcttgttagtgatgctcggggtcttcgctgcgtacgcaatgcaaggcagtgaagtgactgttccagatgtgacagacatgacgcaagaaaacgcgactgcagcattaaccgcagataaattaaaagttggtaagattcaaaaaactactagcaataagtacagcaaagggcatgtgattttatcgacgcctggtaaaggaatgcatgttaaatcgggcagtacggttgatctaacaatcagtacgggtcgtaaaaagtatgagatcgaagattatacggacaagccgttcacagatgtcagcacgttattgaaacaaaagggactgacggttgtgcgcaaatatcagagttcacgcagtgttgcttcgggactggttttagaccaaagcattgccgcaggtgaaaaagttgtcccaagtaagacgacgattaccttgactgtcagcagcggcaagccaagcattactttacgcaatttgagtaattacacgaaacaggctgttcaagactatgttgatgacgttggtttgacggttactttttcagaggattactccaatacgattgatgaagggttagtcattagccaatcacctggtagtggtgcatctattcaagaaggtgccaatattaacgtggtactttctaaaggtaaaaaagcgcccgctaccaagagttttacgaagtcgattacgattccgtttgataattccttagcaacttcacaaagtagtacaagcagctcgagcgaatcgggtgacagtagtagtacgagctctagttcaagtagtacttcaacggctacgacgaataagattacgatttatttagaagatagcacgcattcaataatgagtgtttataaagaaatgacgattaccgcggatacaaccgttgaattgccatttacgattaaagcggaccaagccggccgtttccggattttaagaaatggtcaagagattctatctgatgaccatgtgacaaactaattgggaggtgacctattgcagacaggacagattattcgcgccctcagtgggttttatgatgtacaaagtgaaggcaaaatttatcgaacgcgtgcgcgtggtaatttccgtaaacggaaaattacgccacttgtcggcgattttgtcgaattcgagagtgaaagtgaaacagaaagtggctatattcttgagattttagaccgtaaaaatgagatgattcgaccaccagtcgctaatattgataatgctgtcgtaattgtttcggcggtggaaccagcattctccttgaatttgttggatcgcttcttgatttatattgaatcgctgcacatgcaagggttagtttatttaaccaagaccgatatgattagtgatcaacaataccaagaaattagtgattacttggcgtattacgcgaagattggctatcaaatttttgcaccgcggaccgcctttacaccggagataattacggcaattgaagacacgttcccgcataaaacaaccgtctttacaggacaaacgggggccggtaagtcaacgttgttaaaccacattgacccgagcttgaatattgcaactgccgaaatttcgcagagtttaaatcgtgggaaacatacaacccggcatattgaactgattccgttgaatgatgggttagttggtgatacgcctggcttttcatcacttggtttattaaacgtcacgattgaaaccttggttgaccgattcccagagttcagagaaatcgggcaaggatgcaagtttagaacgtgtcaacacgtgatggaaccgaaatgtgccgtgaaagaagctgtcgacagtggcgaaattatgcaaagtcgttatacgaattatttacagtttagagcagaattaaaggatattcggccagtttacaagaagtcaaaataaaaatgtgatcggagttttgatgatgaaacaaatcgcaccttcaattttaagcgcagactttatgaacttacaaagagacgtccaaaaccttgaaaaggcgggcgctgatctattacatgtggatatcatggatgggatgtttgtccccaacatgtcgtttggcccccaagtagtaactggcttgcggccattgacaacgttaggcttagatgtccatttaatggtggaacaaccagaacgctacatcgaacaatttgcagcagctggttcagacttaatcatgattcatgccgaagcaacgcaacatctctaccgtggtcttcagatgattaaagatgctggtgttaaagcaggcgtggtgatcaatccagggacaccagttagtgcgattgaaccagtcttatcattggttgatcaagtcttagtaatgacggttaatcccggttttggtgggcagaagtttattccagcgatgttggataaggtcactgaattagcgacttatcgcgatcaacatgctgatgcagattatacgattgaagtcgatggtggggttaacgaccaaaccatcggtgcgtgtgccaaagcaggcgcagatgttttcgttgccggttcatatacgtttgccggtgatttagcaacccggattgcaactttaaagcaggctgctcatgacgcggattaatgtgttggtgggaggaccagtcagtgagtgggcccccgaattggcgcagccagaaatgattgatggtcaatgggtgacagcagaccgtggtacgtggcgcttattgcaaaaaggcgtaacacctgtcgtgtcagtcggcgattttgattcattgacggcggctgagcggaccaccgttcaatcagcagtaaaggatattcgctctgtgcaagcagaaaaagatgataccgacactcagttggcattatcaattgcgctaactgaatttaatgcggatcaagttgtgctttatggcgcaacaggcggtcggttggaccactttcttgctaatctctttatgcccttagaaagccgttttaagccgtttttagaccgcttagagatgcgcgatcggcaaaatacgattcgcttttatgcaccagggacgtatcaattacaaaaagaagccgataaacggtatctggcctttgtgccattagttcccacaactggtttaaatttaattgatgaaaaatatcgcttggtggattaccaaacacaagtcccgatttcatgggctagtaatgagttcatcggtgagaccggccaatttagttttgaaactggggtggttgcggtgattcaaagtaaggattaaaaagacggctcggataaaattattttatccgagccgtctttttggttgccataaacgtgttcgatcagtcatcgcctgaggattagccgacttatctcgcactttttgccaaaaaaatagaccgccaactggcgatctatcaattgaaattatacacgagttactttgcctgatttcaaagcacgggctgaaacccaaacacgtttaggtttgccatcaactaagatacgtactttttgtaaatttggcttccaagaacgacgagatgcgttcaaagcgtgtgaacgcttgttgccaaatgatgttttacggccggtaataacgtcttttgccatggtcttattcctcctttaagtaaagccggtagaattaacgagaaacataatatgattcagttagtcttaatagttgcatgcatgcacaccggcttatacaattcacttaaataatttaccataatagtttggggaatgcaagagctctttcaaggaaatttacttgacagtccaaaataagtcgtttaaactcattaaagtccaaaaataagccgcatttggggaagaattcatcaccagttgctttgcaactcttctccgctatgctaaaataacaataagtatggcacaaggaggctattttaatggctgttaaaattaaaacacaatatggcgatattgatattaccaataacgtgattgcaaccgtcgttggtggcgctgcaacagatatctacggaattgttgggatggcaagtaagaatcaaatccgtgacaatttaaacgatattttgaatcgtgagaattataatcggggtgtcgtagtccgtcaagaagacaatggcgttgcgattgatgtctatattattgttggttacggcattaagatctctgaagtttgccgtaacgtccagagtaaagtgaagtacaatcttgaaacaatgttgggtgtcggtgcgaactcagtgaatatttatgttcaaggtgtacgggtattagaagactaaaactaattagcggagctggccactaggtccagttctatttgtttttgttcaaggaggaacattcgtgaaagttactgaaatcacagcagcagaattccaagcaatgatgcgggttgctgcacatcggcttactaaaaatgcagaatttgtcaattcattaaacgtctttccagtgcctgatggggatactgggaccaatatgagtttaacgtttcaaagtggggccaaagcagttaatgaaaacaacgcgcaatctgtcggtgaattatctaagagtttagccaaggggcttttgatgggcgctcggggtaactccggggttatcagttcacaaattttccgtggtttttctaagagcatggctgaaaaagaaacgttggatgcacaagatttggctgacgcattcacaaatggtgttcaaacggcttataaagcagtaatgaaacccgttgaaggcacgattttgacggttgccagaaaaggcgccaaagctggtgccaaggttgccggtcaaactgatgatatcggtgcagttatcgaagctgttgttgagggttctaagaaggccttgttgaagacccctgaattactccctgtcttaaaagaagtcggcgttgtcgattctggtggtcaaggattggtcttcatctatgaaggtttcttagaaggtttaacaggccaagcacctgcaaaagatctttacacacctgatgaagcggaaatggatgaaatggtcaatgccaatcatcatcaaaccgctcaaatgggtacagaagatattgaaaatggttattgtactgaaatcatggtcgcccttggtgacgggacaactgtcgatcgcgaatttgattatgatgaattccgcaatcatttaaacggtgttggtgactctctcttagtggtagccgatgaagaagtggtgaaggtccatgtgcatacagaacatccagggacagtcatggcttacggccaacactttggttcattagtgaagattaaagtcgataacatgcgtttacaacatgatacgattgttgaaaacgaccaacaagctgctgcccctgtgcaagcagaacctgttgaaaatgggattatcgcgattgcggccggtgatgggattgctgaactcttcaagagtttaggggctacttatatcttaagtggtggtcaaaccatgaatccaagtacgcaagatattttagatgcgattaaagcagccaatgctaaacaagtgatcttattaccaaataataagaacatcttcttagccgctgaacaagctgccgaagtggctgatattccagttgcaatcgtgcaaagtcggacgattgctcaagggatgaccgctctcttatcatttgacccatctgctgaattggctgttaatcaagaagccatgacagaggcgttagataccgtgattagtggtcaagtaacgcaatcaatccgggacacgactttagatggacttgaaattaagaaagacgattacatggggattatcgatggtaagattaaggtctcaacggctgaacgtttaacagcagccattgaaatggtccaaacaatgcttgatgaagacagtgaaatcgtcacaattattatcggggaagacggcgatgcaacagaagctgaacaaatcagtgatgcaattatggcccaagacccagaattagaagttgaagtacacgaagggaatcaaccagtttacccatacttgatttcagttgaatagttaatcaaataaaacgggaatgaggttgaatatacctggttcccgttttttagtagaagtacgtttaaccttggaatatggttaaaaagcacgttaagaaaaagaagtgtatcaaaagtgcttatcctgtgaggattagtttaattagccgaatgactagcgtagctacttgtttggctaatggtgctaaacgcaacaggatgcttttgaaagcacgttacaggaggctgtcaatgttaagtttaacggattctgttgctgtgttagctggcgtcggcccgaaacgtctgacagccctcgatcagcttggcataaggaccattagtgatttattgtattattttccgtttcgttacgaagatttgaaggtcaaggatttatccgaagcggcagatcaggaaaaggtgacgttaaaaggaacggtcgtcgctgatccgatcatcagtcgttggggaccagggaagacccggctgaatgtacggctcttgattgaacatgacgttgtgatggttactttttttaatcaaccctatcttaaggacaagtttgaagccggggtcgatgtcgctatttatggcaagtgggatgctaaacgtcatacattgacggggatgaaggtcctagcggttcaatcggctgagaatccatcgtttgcggccatctattccgttaataaaagtgtgcgtcaagggacactggtcaagatgattcaagaagcctttgatttgtatcaagacgttattcccgaattgatcccagaggatattcgcacgcgctataagttaatgaacgaacgcgacttaattgctggcatgcatttccctaaaacgtatcctgaagcaaagcaagcacgccgaagcgctatttttcatgagttcttcctatatcagattcaattacaagccattaaacagactgatcggcatgtggcaaacggtttagctttgcagtaccaaaatgaagcacttaaagattttattcaaaccttaccgtttgatttaaccgatgcacaaaagcgagtggtgaatgaaatttgtcttgatttaaaatcaccagcgcatatgaatcgccttctccaaggggatgttggttctgggaaaacgattgtggcggcgattgcgctgttcgcggcagtgactgcgggttatcaagccgcattgatggtgccaacggaaattctggcggaacaacactatcaaagcttgcaacgcttattggcaccaatgaacgtgactgttggcttattgaccggttcgacgacggctaaagaacggcggacgttgttggcagacattgaatccgggcgcatcaatattattattggcacccatgccttgattcaagatgcagtggtctatcataagttaggctttgctgtaattgatgaacaacatcgtttcggggtcaaccaacggcgaattttgcgtgaaaaggggttacagcctgatattcttgcaatgacggcgaccccgattccgcggacgctggcgattaccgcgtatggcgagatggacgtttcaacgattgatgaattgccaaaaggacggattccaattgaaaccagttgggtgcgtagtaatcaagtcgaacaagccctcagctttgtccgtaaacaacttgcaaacgattcgcaagtctttgcgattacaccattgattgccgaatctgaacagatggatttaaagaatgccgaggagatttacgcaacgttggtggaacaatttgaacctgattaccatgttgcattgttgcatggccagttaaaagatgatgaaaaaaatcagattatgaacgctttttctgagaacaaaattcaattactggtttcaacaaccgtcgttgaagttggtgtcgatgtgccaaacgcgacggtgatgctcatttttgatgcggatcggttcgggttggcgcaattacatcaattacggggccgggttggccgaggtaagaaaaaggcatactgtattctggtggctgatccgaagaaccaacaaggtgttgatcggatgacgattatgactgaaaccactgatggattcgtcgttgcgcagaaggatttagaattgcgcgggccaggggaagtctttggtgatcgtcaatctggattgcccgtctttaaagttggcgatccagtagccgactttgcgagtttacaagtcgcccaacaagaagtgcaaaaaatcttcacgcttgatcctgagttggcagcaccggaccatacgccactcaaaacatacttacaacaacaaaagcaaaattacctaacgttagattgaaaacggaaagaggaatgatgatgaaaattgcagtagacgcaatgggcggcgattttgcaccccaatcagtaattgaaggggtgttacaagcccgctcagaattaacagatgttgaatttacgttgtatggtgatgaagcacaaattaaaccgttgattgatgatatgacgcggttaacgattgtgcataccaccgaaaaaatcaccagcgaagatgaaccagtgcgtgcgattcggcgtaaaaagcaagcttcaatggttctggcggcgcaggcagttaaagatggggaagcagacgcactcttttcactagggaatactggtgcgctcttagcagccggattattcgtgattggtcggattaaagggattgatcgtccaggtttaatgcctaccctaccagccattaattcagatttaggcttcaatatgttagatgttggggccaacgccgaatcaaagccggagcatttgcatcaatatggcttaatggggaacttctacgcacaagacgtccgtggcattcaaaagccgcgaattggtttgttgaataatgggactgaagctggcaagggtgatgagttgcataaggcagcacatcaactactggcagatgatctaacgttaaacttcattggtaacgttgaagcaagtgaactcttaaaaggcgttgcggatgtcgtggtcacagatgggtttaccggcaatgcgacgcttaaagcaattgaagggactgccacaatcgtgatgtcgcaagtcaaacatgcgattatggatgctggtgtcaaagaaaaaatcggtggtttactcttgaaaaagagtgttggtgggattcgtgataaattcgacacatctgtttatggcggggctgttttattaggcttaaaagcccctgttgttaaggcgcacggtgctgcagatggccgcacggtttactacactgttcgccagattcatgcaatgctggcgaaccaaacgattcaaaaagtaatcgattattttgaccaacaaaatagcccaaaagaaaccgattaaaataggtggacaatgtgttccaaaggcgctacaatatacttcgcaagtctgatttgatttacttgaattgagttgcgaagttatgtataatcactggatacccaaagtgttaagtacgtaggtaagggtttcaatttggaggtttttaattatgaatgaacaagaaatctttgataagattgcggctattattggcgatcgatttgagttaaataaggatcaggtaacagacgaattgaacttcaaggaagacttggatgctgattcaattgatattgtggaatttgttttggaattagaagacacttttggtgccgaaattccggatgaagaagctgaaaagatcggtacggtagctgatgccgttgcttacattaaaacaaaaatcaaataataaccttgaaaacgagcctgttggttgtgagtattcgcgaccgacaggcttatttttttgcattttaaacagtttgtgaaaatgagattattcacataataatcatttgcggatgcgttataatattagaatgattcttataatggctctgcatcaatgaaaataaattagaatattttaatctttattatttacttttcatttttaatcatgtattattatttttaataactgaagggagtgtccatatgaaacgagaaaagagtttggtattaggtataacaacagtggcggtcacattattattagcagcttgtggtaactcaggtagcaaggaagccgttaagactgacacagccagttttgcaactggggatgtcattgcgacaatggattcagcgttaaatacggatgtgatcggtgcacaggctttaaccgatacgatggaaggtctttaccgctacgagggtaaagaaattaaaccggcgattgcgactaaagtagtcaaaccaactaataacggtttaacatatacattcccattaagaaaagacgcgaagtggagcaatggtcaaccggtcacggcagaagatttcgtttatgcttggcgcagagtcgttgatccaaaggtcggttcacaatatgcttatatctatgaaggcattaaaaatgcagcagacatcacgactggtaaggaaccggttaattcattgggtgtagtcgctaaggataaacacaccttagaagtcacccttgaaaaaccaattccatacttcagtcaattgatgaccagttcaacattcttcccccaatatccagaagcggtcaagaaagctggcaagagttacgggacaaattctaaaacattagttttcaacggcccttataaattagaaaattggaatggcccagatagctcatggaaagaagttaaaaacaccaattactggaatgcgaaagcagttaaggttaagacgttgaagtatcaagtggttaaagatccatcaacagctttaaacctcttccaaagtaataaattagatcggacggcgatcagtggtgacacagctaaacaaatgaaaaacgatccacattactcaaccttacaaaaagcagcaacattctacatgcaagtcaaccaagaaaagaatccaatctttaaaaatgcgaagattcgccgagcaatttcaatgacaattaatcgtaaagaattagtcgcacaggttctaggtgatggttcaagtccaattgcttctgtgacaccaaagaatatgtcatttgacccaacaactaagaaagattttgttgatgatttagacgcagcgggtaagaaaaatgtaagttacaaccctaaagaagcaacaaaactttggaacgaaggccttgctgaaactgggcaaacaggcaaaacattcaattacacattacttggcgatgatacggatactgccaagaaacaatccgaatatctccaaaacacattacaaaagaacttaccaggtttgaaagtcacattagcgaacgtgccatttaagactcgtataacacgttcaacgaacggtgatttcgacatggtggttagtgcttggaacgctgatttcccagatccagtcacattcttagacttgtttgtaacaggcggcgataacaataatggccattggagcaatgccgaatacgatgcacagatcaaggcaagtaaaggtgacaacgccaatgatcctaaagcaagatggcaaaaccttgttaaggcacaagatattatgaatacagagtcaggtgtcattccactgtatcaatcaggtgtggcgtacttaactaacccaagccttaaaggtttagactacggcccttcaggaagctacaataatgtctcactttatttaaaaaaataaactgactttataaagatgggtttcagcgttgaaaaacaatgaagcccgtttttgttaggagcgaacttatgagtaaataccttgttaaacgaatattctatttagtgctaaccctattcattgtcgcttctgtgaccttcttcatgatgaagttgatgccagggacgccatatacgaatcaggaaaaaatgagtgctgatcaattacggatcatgaatgaacagtacggtttgaacaaaccattaattcagcaatatttcatctatctaggtggcttgttgcatggtgattttggcacatccttccagttcaacaatcagcccgtcttgagcctaatcatgacgcgtttaggaccttcattacaaatcggggcacaagcgatgattgtcggctcattactgggtattttactaggggcagtggcggccattcgcaagaatacatgggtcgatggcgttgcaacgttcttttcaatcgttgggatttcaattccgaactttgtgttggcggtcttactccaatttttccttgcctttaaattacaactattcccaattgcgttatgggacggctggtcatctagtgtcttaccaacattagcactagcggttgcaccattggcgaatacggcccggttcatgcggactgaaatggtcgatgttttaaacagtgattacatcgaactcgctaaagccaaaggcaattcaaaatggcaaacagtggcaaagcatgccttacgaaattcaatgattccagttgttacgattatcgggccgatggcagtcaacttgatgactgggtcactagttgttgaaaatattttctcgattcccgggattggggaacaatttgtgaagtcaattatgacgaatgattatccaacaatcatgggcttgaccattttctattcattcttattaacagtgattattctagtcgtcgatattctttacgggattattgatccacgaattcgattaagtgacagtcagggggcgcactaaatggcggatattaaaataccagcgggctcattcaagccccttacacaagacacgcatgaagcacaagaaaaaattagtgcaccatcattgacgtttacgcaagatgccattcggcgcttaaagcaaaataaagttgcggtggtttcattagttgtcctcttgattgtgatgttggctgctttattggcaccagtgattgcaccacaaagtccaaatacacaaaatgtggcgtacgctaacctaccccctaaaattggatcggggaatatccctggttttaccggtaagatggacgtttccggtgttaaagttgataaatatcaacaagcgggcgttcccaaaggcaaaacgtttatcttagggacggattatctcggtcgtgatttattatcacgaattttatacgggacacgcttatccttattaattgggattctagcgacattggtcgatttattaatcgggattccatatgggattgtttccggatggcgtggtggccgtttggatatgttcatgcagcgggtaattgaaatcatttcatcaattccaaacttaattgtggttgtcttgatgatgttggtactccgtccaggtttattgtcaatcgtcatcgcgattgggtttaccggttggattacaatggcccggttgattcgggctcaaacgttccaacttaaggaacaagaattcgtgctcgccgcacggacgttgggtgaaagttccaccaagattgcttggaaacatctgattccgaatttatcctcaacgattattattcaaacgatgtttacaattccgagtgcgattttcttcgaagcattcttgagctttatcgggattgggattccagcgccgaatgcttcattagggacgttattatcagatgggcaaaaagctttccgtttcttgccatatcaaatgtggtatccagcagcagtcctctgtgtgatcatgattgccgtcaacttactagcagacggattaagagacgcattcgatccaaaatcatagcgtgtgtaagtaggcggttatctttcgcggattagcatagtctggcgaataatcaacttgttgattatttgttagacgtagctaaccataaaaagcagttaatgaaagcacgtttagaagcagagtcagtttcaaaaagcatgtcaatacaaggccgtttccacgcggtttcatcattggaggtcgtcaaatggcaaatattttagaagttaaacatttaagtatcgattttaaaacctacgcagggaacgtccatgctattcgcgatgtcagtttcaacttgaaaaaaggcgaaacactagcgattgttggtgaatcaggttcaggtaagtcggtaacggtccgtagtattatgggcttgttagcgggcaatgctcaaattaagggtggtacaatcaagtatcacaatgaagatctcttacaaaaaccagaacaggaaatgaatgccttacgtggtagcgatatttccatgattttccaagatccgatgacgtcattggatccaacgatgccgattggtaaacaagttgctgaacctttgttgattcataaaacaatgaataaggaagaagcaatgaaacgtgcacagagtgttttagagttggtgggtattccgaatgccaaagcacggatgaaagattatccgcatcaattttctggtgggcaacggcaacgaatcgtgattgcgattgcgattgttgattatccacaaatcctgattgccgacgaaccgacaaccgcgcttgatgtgacagtgcaagcacaaattatcgatttgatgaaggaattgcaacgcaagattgaaacctcaattattttcattacgcatgatttaggtgttgtggcagggattgccgatcgcgtagcggtaatgtatgctggtaagattatcgaatatgggttggttgatgaaattttttatcaacccaagcatccatatacgtggggcttattgaactcaatgccaacacttgatacttctggccgtcttgaagccattccagggaccccaccagacttgttggatccaccaaaaggggatgccttcgcaccgcgtaatccatatgctttacaaattgatgtggaacaggaaccgccatttttccaagtgtcgaaaacgcattttgcggcaacttggttgttgcatccagatgcaccagctgtagaaccaccagcagccgtccgtgcaatgatggctaagtatcaggcgacacaagttcaagagaaagtagggacaattgatggacaaggataaaaaagtattagtgtcggttaaacatttaaagcaatattttagccaaggaaaaaaatccgaagtcaaagccattgatgatgtctcatttgaaatctatgaaggcgaaacgtttggcttggtgggtgaatctggttctgggaagagtacaactgggcggagtatcatccggctgtataacccgacagatggtgaaattctattcgatggccgtgacattagtaagattaaaaatcatagtcgtgaaatgaaggcgttccggaaagagattcagatgatttttcaagatccctacgcgtcattgaatccacggatgaaagtcaaagacatcatcgctgagggcttgcatatccatcatttggttaaaaatgatgcagaatgtgatgcacgcgtcaacgaacttttggaattagttggtttgaataaagaccatgcaacgcgttatccatatgaattctccggtgggcaacgccaacgtattgggattgcccgcgcgcttgcggtaaaacctaaatttatcattgcggatgaaccgatttcggcgcttgacgtatcgattcaagcacaagtggttaacttgatgaaagaaattcaagaacagcaaaacttgacgtatttattcatcgcacatgatttatcgatggtgaaatacattagtgatcggattgcggtgatgcataacggtaaaattatggaattggcatcagccgatgacatttatgatcgaccattgcatccatatacgcaaagtctattgtctgctgtgccgttacctgatccaaaggtcgagcggcaacgtcggcgaattgcttatgatagttcaattgaggcagataatgaaggtcgtcaattgcgcgaagtggccgatgaacactatgtctatgcaactgaagctgaactagcgagttatcaaaccgctttagcagcaatgacaacgccatctgcataaagcaacgcctgttttgaaatattcgtttgcgtgttacaatgaatacttcaaaacaggcgttttttagtgattaataaaagaaacggtttgctaggaacgacgctgtttttttaagcgtataaacggtataatagtgaaagattaaacagttgaaatggggtaatttaattttggatgcagcactagtgagcgagcttcgagcccgctacggcattgaatttcagaatttagcactattggacgaagcctttacacattcgtcatacgtcaatgaacaccgggagttgggtcttcgtgataacgaacgactcgaattcttgggcgacgcggtgatggaaattacggtttcagaatacttatataaaaaatatccggactggccagaaggcaaactgacacgcttacgggcggcaatcgtctgcacgaagagtttcagtagttttgccaaagaagcgcactttgatcgatacattcgccttggtaaaggggaagaaaaaaacggtgcgcgggcacgagcaacacttttggaagatttatttgaagcgtttaacggcgctttgttcttagatcaagggcgtggcgcagttgttaaattcatcgaacaagttgtctttcccaagattgaagccggtgaattttcagaccaaacggattataagaccaatctgcaagagttcttgcaacaagatggtgaagttgagattgaatataagttattggcagaagtgggaccatcacatgcccgtcaatttgaagtggatgttatgatgggcgatcgcgtcttaggttcaggtgttggccgaaacaaaaaagcagccgaacaagcagctgctaaagtggcgcttgccaaactgaaataaagaaagaagcaaacgacagttgaaaccaaccgccgtgtgtagggagtttagtgcatgcagttaaagtcattggttttatcagggtttaaatcatttgctgataaaacagaaatcaatttttcagaaggtttaacgggcatcgttggaccaaacgggagcggtaaaagtaacgtcacagaagcaattcggtgggcgatgggcgaacaatcagccaagagcttacggggcgaaaagatgcccgacatcatttttgccgggactgatattcgaccacagatgaataaggcagaagtgacgctggcttttgataacagcgatcaatatttgaaacaagaacaagccaacataacgattacgcggcgtttatttagaaatggcgatagtgagttttatttgaatcaaaagagttgtcggttaaaagacatcgttaatttatttatggattctggccttgggcgagaatctttttcgattatttcgcaaggtcgggttgaagcaattttcaacagtaaaccagaagatcggcggaatattattgaagaagcggccggtgttttgaaatataaacaacaaaagaaaaaggctcaatctgaattagatcaaacagatgaaaatttgagtcgggtcaccgacattcttcatgaactacggggacaagttgaaccgttgaaggaacaaagcagtattgcgcaggattacttggatcaaaaagcgcaatatgatgcgttgcaccaacaattattggtgattgaaattgatcaattagtggctgatcaaaagacgtacaaagaaaaggcgcaaacccttgcgcaagcgttgcaagagattgaagcggacatcgctaagacgacggctgcccaaaccgagaatcaggcaaccttagcccagttggaacaacaaatagaacaagataatcagacgttgttagaaaagtctcgcttggctgaaaatctattaggccaagagaacgtttcaaaagagcgcgctaattatacggatgcgaaccgccaaagtttagtcgaacagatcgacacattaaaacagcaattaacggcggaacaagccaatcaatctgaattaaaggcaagttatgaagaaaaggtgacggcattaagggcgttgaagacggagttaaccacccttaaacgccaagcgtctggtagtgaagcggaactgaaagcgaagattgaacaaattcgtcaagaatacatcgatcagatgcaagcccaaacgaccaatcataatgaacaacaatatttagaaaagaacttgttacaaactaaaacgcaacttgcacggcaagatagtgcagtcgatgagacatcgacgcaattggcacaaaaaaaggcagaacaagcggcccaaaaagcccaacttgaaacactcaaagcgcaatacgaaacgttgtccaatgagttggccgaattacaaacgcaaattaacacggaccaagcggcttaccaaaatcaacaaaatagttggttccaagcgtctggtattttacaaaaagcgaaagcaaaacaagccagtcttgcggaattaaatgatgactacgccggcttttatcaaggggttaaggctgtcttgaagcaaaaacaacagttccctggtttattaggggctgtagcggaattgatgcaagtgcccagtgagtatcaacaagcgattgaattagcattaggcgcacagctacaacaagttgtgacacgggatgaacagacggccaaacaagcgattgagtatttgaaaaccaatcggattgggcgggcaactttcttacccaataacgttgtcaaaccacgtttactaccaagtagcttagttcaccaattacaacagcagcctggatttatcggaattgccagtgagcttgtgcagtttgatgaacaagtgcgaccggtgatgaaccatttgatgggcaatttgattgtcgcgactgagttggagccggcgattaaattgagtcaattgacggggcatcgttaccgaatcattacgttagcaggggatattttaagcccgggtggttcgatgactgggggccataataaccgacaaaacaatggtgggctacttgcgcgtaagcaaaccttgactgatttagaaggtcaaattgccaagatgcaggtcgctttggatcaaaagcaagccagtgtccaagccgcaaaagctcaattaacggcacgccaagcagaattaaatacgaaacaagcggcattggaaaccgctaagaatcaatatcaagctgcccaaaatacgttagccttgactgacgaacgtttgagtcagtttgaacggcaacaacaagcaaccgattatcaagtgcaacaacaacaacaagcttatgaggaagatttaaaacgccaggcagaattagtggcagccgaagctgaaattgttgcgtcgattgcacagctgcaagcagatctcgaaacagctaatgagcaattacaacattttgatgagagtcaaaaacaaattgcgcaacaacaaacagccctcgaaaccaagttggctgtcgctcaagctgaacaaaagaatgttcaggagaaattaacggttgctactcgcaatagcaacgacctggcagcccagttgaaggccagtcaggataaactagctgcgctaaaacaagcggatcaagaagatgcttcgagtcaaaaagaacgacgagcactgctaaaggcaaccaatgctttgattgagaaagtccaagcgaagttagccactgaacgcgcgcaaaaagaaacgctgaaggcggaacaacaaacgcttcaagccaatgccacacgcgtctaccaattacaaaaaaatagtttagctgagcaagaacaaaatgctgtcgggctcaaccgggttaaaattaacattgatcaacgcttaaatacattgagcgaagattaccaattgacttacgaagccgccaaggccgctttggccgcatcagacttaaccgacgatcaattgcggtctaagttgaaattattgaaactcggcttagctgatttaggaacggtcaacttggcggccattgatgattatcaacatgttaaagaacgttacgatttcttgatgcaacaagatgccgacttgatggacgctaagcgccaattattagcatcgatggctgaaatggatacggaagttgaaaagcggtttaaggaaacgtttgaacaaactgccgctgcttttgaaaccatcttcccgatcatgtttggtggcggccatgccagtttaacgttgacggatccaagcgcactattaacgagtgggattgacattattgcgcaaccacctggtaagaaactacaacgcttgagtcttttatctggtggtgaacgcgcattgacggcgattacgttattgtttgccatcttaaaagtacgcccagtgccgttttgtattttggacgaagtcgaagcttcgttggacgaagccaacgttgatcgtttcggtcgtttcatgaaacgttatgagagtgatacacaattcatcgtgattacccacagaaaagggacgatgacccaagccaatcgcttatacggggtgacaatggcggaatctggaatctcgaagattgtttccgtttcattagaagaacacgcaacagcctaggaggaaaaccatgggattatttgatcgtattaaaaaagcattctcagccgaaccagaaaaagaaacaccggttgaacaagaccaagcgataccggaaacaccggttgaatcagacgctacgccggttgaatcgcaaacccctgcagaaactgcggcagctgagaaaactgaaaccgatgaaccagccagtttagcaactgaagatgattcagaaacggtatcaccgcttgacacaccaacggcggcacccgtaaacccagaaccagaaccagaaccagaaccagaaccagaaccagttgaagcgtcggcagtaactgaagaatccgatgcgattgaagaagtgccggaaacagaagcagtaactggcgacatgcaagctgctgaaacgaagaagtatgatgatggattagaaaaatctcggctcacatttgggcaacgcttaaatgcgttgttcgctaactttagaagtgttgatgaagcctttttcgatgatgttgaagaaatgttaattgaagccgatgttggctacgaaacagcgatgaagattgctgacgaattacgtgacgaagtgaagttgcgtaacgttaagaaaccagaagcggtttcacaagcgattgttgaaaagctagttgatttgtacggtcaagaagaccaagcagaagataatcaattgcatttcgctccacaaggcgaattaactgtcttcttattcgttggtgtcaatggtgcagggaaaacaacctcaatcgggaagtttgcccaccaattagaaaaagcgggtaagaaggtcttattagcggctggtgatacctttagagcgggcgccatcgaacaattacaagaatggggtcgccgggataatgtccccgtggttgctagtgcagcagggagtgatccagcgtcagttgtctatgacgcggttaagcgcgctaaagaagaacaattcgatattttattagttgatacggccggtcgtttgcaaaacaacgtcaacttgatgaaggaattggaaaaagtgaaacgcatcatcacgcgtgaagtaccagctgcaccgcaagaagtattgttggtcttagatgcaacaaccggacaaaatgctttagtccaagctaaacaattcaagcaaacgaccgatgtgactgggattatcttaaccaagctagatggttcggccaagggtgggattgtgttagccgttcgcacagaattacacttaccagtgaagatggttggtctaggtgaacaaatgaacgacttacaactctttgatccaaaccgctttgtttatggcttattcaaggatattattgtcggtgatgggccacaaagtgacgtagatactgacgttagccaggcaattaaatgaaatttgtaacttcagatcaaattacactggattatactgatattggtgaagggcagccaatgctttttatcgctggattcggggcggccaaggaaatttggcatgcgcaagcagccttttttgaagctcatcattatcgagtgattcaactagacgttcgtaatcaaggaatggcacaacatactgtcaagggcttgcgaatgtctagaatggcgctggatcttgctgaagtaatcaccaagcttggattggccaagccaattttagtggggaattcaatgggcgctgcttgtatttgggcatacatgtcgctgtacggtgatcgtgacttagacaaagtcgtgattgttgatcagtcacccaagatgattgcggatgaaacatggtcgtttggttttaaggatttgacttgggatagttttccgctgcaattgcgtttggattttggtaaggcgacttaccgggcaatcgatacggatacggctgatgtggtggcacaagtcaagcaacaatcaccgtttgatcggcagcttgatttaccgttgttggtcgatcatgcatttcaagattggcgggatgtgattcgccagagtatgcgcccgtatttagtgattgcgggtgaaaagagcccgtttttcaatccagccttcgcaccaatcgtggcacaaatgggtgctgatgggcatgcacaggtgattgaagaagccggacacattgtgatggcagaacaatcagccctctttaatcaaatcgtattagcctttatcaaggcctaaaaaaccgccaagacagtttgtcttggcggtttttttgcgttaattgtgaatggctaggattttggtagcagttggttcatctaaaacaagatcggtgaggaagttaccgcgaagtgcagctgcaacggcatggcttttaaatttattgttcacgacggctacccgaatcggcacttgtaaaatggaatcaatggctaagccaaatgttttgtcggcaatgggattgattaagaattgaccagcatgattgaatggtcgaccatataaaaagccagcgacttccttgcgattgagattagggaacaatgcaactagactctcttgccaactaggaatagattctaatgattcaattgttcctaaggtagtgagaattaaatccatctgacgcgcggtggtgagggtgggttgaatcgctggttctaaacttaagagttggcgaacctgatcattgatgatgtaaagcggcgcattgagggttgaatagtggctattgtatttattggcggccttttgcaccatgcgcattgagcccgccagtgaattatacttgccattttcgcccataaattgagtgaaaattaactgttccttgaccgttggtttaaagtgttcgataacgttatagacggtgtctccccaactgagaccaataatttttaaaggattaatcagattttgaaccgtttgtgccgcaaatgagtaaaaacgatccgcatcattattgctttgttcagcgttcgctaggacatagaagtggtggccaggattgacggcggccaattggcgttcaagttcttggttccgtgcaaaaggggagcggatactaattgaaacgatattctgggcgagtgcctcatcgagatactttgagatcatgtaacgactcacctgatatttcgtcgaaatatcagcgatggttaattggttgatatagaaatcttgagcaatatcgattaataggttggtatttgtttgttcggccatgggctgctccttgaatgaatttattcgcaaagacgaataaaaaaattttatatattaaatatagcgctttctatttacaaagtgaagcattagacgtattattaatttaaaatattttaaaaataatcgtgttttttgaaatattttaaaatgcttcaaatttatcaaaatgggaggttgataaaatggctcttgatgaaataaaagcattgcatgaaaaacatacaggtgtcttgagtattcacggtgaattacccgtaacgaatcgtactgatttgggaaaagcatatacaccgggggtcgcggggttaagtaagttaatccaacaaaatccagcgcttgcccgtcaatatacgattagcggcaaactagttgccattatcactgatggctccgcagtattgggtttaggcgatatcggtccacaaggtggcctaccagtcgttgagggaaaggcgcttttgtataaagagttagccggagtcgatgcgattccacttgcgctagaacaaacgagtgttccagaattcgttcaaacggttaaaaatatgagtaaaagttttgccggtattcatctggaagatatcaaagcgcctagatgttttgaaatcgaagatcaattgaatgaagtgcttgatatcccagtatatcatgatgatcaagaaggaactgcaattgttgtgttagcaggtttaatcaacgctgcgaaagtggttggtaaatcgttaacggatttgaaagtggttttgacgggtgctggtgcttcgggtttagcaaccgctaaattgttagcgagcgttgggattcaacacattacattggttgatcaaaaaggggtcattcgtgatcaacaaaccagtttgaatgattatcaattaaaatttgttcaagcggttcaaccagaaacagatgcaacaacgttagcggaagctttagtcgatcaagatgtgttaatcgggttatccgttggggagcttgtaacggctgagatggttcaatcaatggcgacagatccaattatcttcgcattagccaacccagtacctgaaattgatccagaattggccaaaaaagcaggtgctgctgtgattgcaactgggagttcggcctatcctaaccaagtgaataatatcttggcgttcccagggttattcaaaggtttattggaaaatcacattacacattttgaaacagcaatggaaggcgaaattgccaaagcattagcgaatatgattcaagcaccaacgaatgaaaaaattgtcccaggggtttttgaccaaggtgttgtcaatacggttgtagaagcagtaaagcagtataaataatgatttagaatggggtttttagtgatggaagcaaaaaaaactatcaacaatcagaatttatttcagaaatttattgcattacacattgggattatcccaatgccgctatatttaatactagcgcttggttacattctattaacaatgaataaccagatgcctaacgatatgttaggtgcgctaggggtcatgacattattctcatttattcttgaagaaattgggaaacacattccagtcttgaaatcattgggtggtaaggtattagtcgttacattcttaccctcatacctcgtttatcaaaactggttacctaaaagtaccgtgcacgttgtcacagattttatgacacgaaataatttcttagctttctttattgccctattaatcgttggtagtattagcgcgatgaaccggaaaacattaatcaaggcaagtactagaattatcgttgtcttattgatttgtgaattagttgggccacttttgggcatcgcagtcggaacgttattaggtctttctgcatggaagagttatttttacgttgttgcaccgattatggccggtggtgtcggtgaaggggcactgccattatcactgggttacgcagcaattatttcgatgacgcaacctaagatttttgcgatgattctaccttgcgtcatgttagggagtttggttgccgttatcttagccggtattttgaaaaaaatcggtgacgttcatcctgaattaacggggaatgggcgtttagtagatactgatgaagctgaatcaggacttgataacttaacacaaaaaacaagcggcgctgatatcgaaaaaatgttagtatcaggtattttagcagttgccctttacctattaggagtgtgggtcaatagcgtgattcatttacccgcaccaatcgtgttattaattgtcgtgatggctgctaaaatgttaggctggattcctgaaagtttacaagctggtgggagttcattatatagtttaacggtaaagggaattacaccgccactcttgtttggggtcggggttgcaatgacgccttggaattcattgattacggtctttacgaatgtcccaatgttaattacgattgttgtgactgtcacagggatcgtaacggcagctttcttcagtgcaaaacttttaggcatgtatccagtagatacggcaattgcggtttcgtgttgtagcggacaaggtgggaccggtgccttagcgattttagcagcgggcgatcgaatggttcttatgccatttgcacaagttgctgttcgactaggtggtgcgattacggttaccctttctattttcttaatgcgcctattcgcttagaaggagtgccacatggattattctcaacaaacaagacagcttaatttgaaagaaactcattattatcaacaatgggtcacgttactgacacaagaggggattgaagggttaccccaaaccgtgaatgatgtagaggcgtgctttggtatttttgaagggcagcagctcattgcgacgggggcctatcagaaaaatgtgctaaagtacattgcggtcgatcatcattatcaagatggcaagttatttaatgccattatttcgacattaattagcgcgttggcgcaaaaaggtatttttcacatctttgtgtttacgaaaccaaaatatcgacaaagctttgaatttgtcgggtttaatttattggcggaaactgacgtcgctgttttgctagaaacgggtgatgtttcgctacaacaatttattgcacaggtaccaagaccaagggttcaaaaacaaacgcaagccgcaattagtgcgattgttatgaatgccaatccattcacattagggcaccgctatttagtggagcaggcggcaaaggcgagtgatttcgtttatgtttttgtggttagtcaagatgtctcgctgtttacaaccgccgaacgcttcaaactcgttcaacaaggggtcgcggatttaacgaatgtggtggtagtcccaacaagcgactatatggttagttatgcgaccttccctgcttactttttaccagaatcacaagatgtgattggatatcaaaccgccttggatgcccaattatttaaaaaaattgcggcacagttaaacattcaatatcgctttttaggggaagaaccattttccaaaacaacggcattatacaatcaagcattggcgactaatttgccacctgaagtgactgttaaggtgattccaagacgacaggcggcagaccaggttatctctgccacgcgggttagacaagccgttcaagcgggcatgattgaaaccgttcaaaattttgtaccagatacaacttaccaatttattaagcaaaaccaggctagtttacaagccagaattcagaaagggatgcaagttgatggaaattaaacatactgcaattgcaggaacgttagagtcgagtgatattcaaatcatgctttctaaggttgaaggtgcaactgaaatcgaattagaaagtgctgttgaaaaacaatttggagctcaaattcggactttaatgcaaaccatcttagatcaatacggcattacaaatgtcaaaattaaggctgtcgacaaaggcgcgctagattgcaccattaaagcgcgactaatcacggtgattcaacgggcaactgataaagaaaatgatccagattgggaggtgcttggctaatggaacgtttgcgacggacgatgatgtttgtgccaggtaataaccctggaatgttaaaggatgccggtatttacggtgctgattcagtcatgtttgatttagaagattcagtttcacttaccgaaaaagatgcggctagaatgctagtaatgcaggctttacaaacggttgattacggtgaaacagaattagtcgtacggattaatgggttagaaacaccttttgggcgccctgatatctttgcaatggtcaaggctggcgtcgatgtgattcggctacccaagacggaaacggttgacgatgttattgaaaccgaagccgttattgctgaagccgagcattattttaagattccggctaaaacaactaaaatgatggcagccattgaaagtgccgaaggggtcttgaatgcgccagcgattgccaaagcttcagatcgattaattgggattgcaattggtgccgaagattatgtgacaaacatgaagacgcatcgttatcctgatggcgcagaactttcatttgcacggaatatgattcttcatggtgcacgagcagccggcattgcggcgtttgatacagtttactcggatgttgataacgaagcgggctttaatcacgaagttgagttgattcacgaacttggttttgacggcaaatcagttattaatccacgccaaattccgttagtgaatgccatttatgccccaactgaaaaagatgttcaaaatgcaaaagacgttttaaacgccattgaagaagcacggattaagggctctggcgttatttcattaaatgggaaaatggttgataaaccaattgtggcgcgtgcgcaacggaccatgatgttggcggaagcatcacatttagttgatcaggagggaaattggtatgctgaataaagtacaacgcgaattaccagatgatttaatgcaaacaatggcttaccaaccatttgaaacggttgaaatcggtcatcctgaaattcaacgtgtcgcccctaaggtaacagctgatcagggacacgcgaaattagtttcatcgattgaagatgtgattcaaaaagtgggtctaaaaaatgggatgaccatttcattccatcatcatttccgtgaaggagactatgtttttaacgcggtcatgcaaattttgattgaccaaggttttaaagacttaacgttagccccaagttcactgactaacgtgatgaacaagatggttgttaaagcaatcaaggctggtgtggtgacccatattacttcttctgggatgcgtggcgaattaggggatttagtctcacacggtggattagaaaacccagttattttacgctcacatgggaaccgtgcacgggccatcgaaagtggtgatatcaagattgatgttgcgttcttaggtgttcctaatgctgatgaagtcggtaatgcgaacgcgattaaaggtgacgctgtcttcggctcactcggctatgcattgatggatgcacaatatgcagataaggttgttttgttaacggatacgattatgccatatcccaatacaccagccagcatcaagcaaacgcaagttgattatgttgtaaaagttgatcaagttggggaccctgaaaaaattggttcaggtgcaactcgctttaccaaggatcctaaggaattgaaaattgcagaaatggtgaatgccgttattacacactcaccttacttcaaacaaggtttctcattccaaacaggttcaggtggcgctgcattagctgttacgcgttatttgcgcgaatcaatgttgaagaagtccattaccgcttcattcgctttaggcgggattacgaagccaactgttgatttactcaacgaaggcttagtggataaaatcttagacgtgcaggattttgataaagacgcggccgatagtatggcaaccactgaaaatcaacaagaaattgatgcttcttggtatgcagatccttataataaaggggctgcggtcaaccaattagatgtctgcatcttgtcagcacttgaaattgatacgaagtttaacgtgaacgttatgactggttcagatggcgttttacgaggggcaatcggtggccatcaagacgcggccaatgcgaagttaacaattatttctgcaccaattgtcagaggacgaattgcaacgattgttgatgatgtgacaaccgttgttacgccaggtgattcaatcgatgtcttggtcactgaattagggattgcgattaaccccaaacgccatgatttgattgaagcattaagcaatattccatgcgtaccagtgttcacgatcgatgaattacggcaaaaagccgctaaaattgttggacaagcaacaccattagccttcaccgataagccagttgctttggttgagtatcgtgatggcactttaatggacgttgtgtatcaagtaaaggactagtcggatgattaatctgtttgcaactggcacaccacaagagattaatgcggtcctagccaatcgtgatcagcgtgcggctttacaaaataaattggtgcgttcgacgtcatccgataaaagtgtcgtgacactcaagctcaatattcctggtcccattaagaataatgcggcactgacgcagctgtttaagacaggctttgccacttttaaacaagcattaacaattcaacggcaaattgattgggatcagccaacaggtcccgaagcgtttttggtggttgatggctcaccagaaaagattaagcaacgcgctgttatttttgaagaccagcatccattaggccggttatttgacgtcgatgtgctaacttggcaagctgatttgcaacaagcacaacctgtgagtcggcaagattttggacagccagcacgccgatgcttgttatgtgatcagccggcaaaggtttgtgcaagaagtcgacgccatacagtggcagaactacaagctgcaattaaccaacattatcaattattgatggagacgaattagatgaaaacatcccaagcaatcgcgcagcttgcgcaacgtgcactattgtatgaagtgagctgctatcccaaacctggtttagtggatcccatcgatcatcaaacgcacaccgatatggatctgttcacgtttatcgatagtagtgtcgcgttactaccgttttttgaacaatttgttcaggtgggtagtacgtttgagcaatcggatttaacagcactaatggctcaaattcggccgcttggtatgcgagcggaagacgcgatgttgtcagcaaccaaaggtgtgaatacgcataaaggggcgatattctcactaggaattttgttgagtgcgacggggtatctactgcaaaaatcaacattgacaccactgaaattaagtcaaacagttcaagccatgttggcgggattggttgagaatgatttcaaggcccttagtcaaaaggaaccggcgtggctaacaaatggtgagaaactctacctgcaatacggattagttgggatccgtggcgaagcacaggcggggtatccaaccatatttgaaacagcgtacccttacttaaagacacagacgggtgattggaatacgcggttagtgaacacactaataaaaatcattagtgtttcagaagattcaaaccttgttaagcgtagcggcagtttacaaaccttgagagatgttcaaaagcaagcggcagcgattattgctgctggtgggatcgaaactgaaacgggtcagcaaggattaacgaaattagatcacgaagcaacgcggggccattacagtttaggtggcagtgcagatcttctaatcatttcggtttatattgatttgttatttcaataggcaataagaaaaagcgtccgacaatttcttgtcagacgcttttttgaatgaatgattaagctgttttggcttttggttcgcgtcccaaaatcacttgggcgataattaagacgacataggcgattaaaacgccacctagtagactgttggttgcggttgctttaaccaaccagtattcttgccaagcgtgattgttgaagacccaccagaataatagcccgaataataaggttaaggtgtttaaaatggcgaagaaccaaagattaccattttccttgttctttaaatagacgattgagaagattaagttccagagtccccaaccaattaatgcgaatataacgccccaatagataattgttgctgccatcatacaacctccgtagaaatttcaatttaagttatgaaaaagcttacacttctattttagcatgattttttgtttataccagtgaaaagataatttatgcacaaacttctagttaaatcgcgcaataaaacgttgactaagcccgttaaaatcggtactctaatagttaggtcaaactaagtctaggaggcgtcaaatggaactcgcacaaaacgcacgcatgaattcgttgttcgaattttatggcgcacttttaacggcaaaacaacatagttatatctcattatattatggggatgatttttctctcggcgaaattgctgctgaatacaaggttagtcggcaagcggtctatgacaacattcgtcggactgagaaaatcttagagggttacgaagaaaagctgcatctctatcgtaattacgaacagcaaaatgccagtgcagatacgctacaaaagtatattcaagcgcactatccagacgatcaagaactgatgcgcttgttggctgacttactgaatttaaccgaacaataattaacttaaaggactgataaaaaatggcatttgaagggctaacagaacgactacaaggcgcattgagtaagcttcggcgtaaagggaagattaccgaaacagacgtcaatcaagcgatgcgcgagattcggctggcattattagaagccgacgttaactttaaagtggttaaagactttattaaagtcgtcaaggaacgcgccatcggggcagaagtccttgatagcttatcacctgcacaacaaattgtaaaaatcgttgatgaagaattaacgaagatgatgggtgaaacggctgtgccgttgaataaatcaccacatattccaacaatcattatgatggttgggttacaaggggccgggaaaacaaccacggccgggaaattagcaaaatatttaatccaaaatgaaaaagcacggccattgatgattgctgccgatgtttatcggccagctgcgattgaacaattgaagaccgtcggcaagcaagttgacgcacaagtctttgaaatggggacggatgtcaacccagttgaaatcgttcgtcaagggttagcacaagcggccttacaaaagaacgattacgtcttaattgatacggctggtcgtttacaaattgacgaagccttgatgcaagaattggctgatattaatgagctagcccatccaaatgaaatcctcttaacggtcgatgccatgactgggcaagccgctgtcgatgttgctgaaggctttaacagtcgtttagatgtcaccggggtcgtcctaaccaagttagatggcgatacacgtggtggggcagccctttcaattcgcgccgtcactggcaaaccaattaagttcactggtcaaggcgaaaaacttgatcaactcgacattttctatccagaccggatgagtagccgaatccttgggatgggtgacatgttgagcttgattgaaaaagcgcaacaagattatgacgagcaaaaagcagctgatatggctgaaaagatcaaagaaaatagctttgattttaacgatttcttggatcagatggatcaattgcagagcatgggacctttggaagatatcatgaagatgattccagggatggctaataacccacaactcaagaacatcaagatggatccgaaagacatggcgcatatgaaggccatcgttcaatcaatgacgccacaagaacgggaaaatcctgacttattgaatcctagtcgccgtcgtcgtttagcggctggtgctggtcgcccaatcgttgaagttaaccggatgatcaaacaattcaatcaatcgaaaaagatgatgaaccaaatgtcaaagggcaactttaacggcatggaaggtttaatgggcaacggtatcaagggtaaaatgggtaagatggccatgaattcaatgatgaaaaaacaaaagaaaaacaagaagaaacgtctcaaaaacgcgcgtcgttttaaatcttaaaaaaatttgtcctgtaaagaaaaaacactttacacggcgtttgaaatttggtatattatgacatgttaaagaattaataggaggtggcattaatgtcagttaaaattcgtatgaaacgtatgggttcaaagaaacgcccattctaccgtatcgttgttgcagattcacgttcaccacgtgatggtcgctttatccaacaagtaggttactacaatccattaacagaaccagttgacttgaagttagaagaagaagttatcatggattggttacaaaaaggcgcacaaccttctgatactgttcgtaatcttttatcaaaacaagggattatgcaaaaatatcacgaagcacgcttcgctaaaaagtagggattcgttatgacagacgtgaaggaactaattattgcaattgttcagccacttgtcgaacatccggaagacgtcaaattgactgaacatgagacagaacgttttatggaatttgacttacaggttaatccaagtgatatcggtcgcgtcattggcaagcagggacgggttgcacagtccatccgtaccattgtctatagtgtgaaagcaccataccaaaaacggatccgtttaaatattgtagatgcctaacaaaaacgtttaaatgaagcagagatgttttatttaggcgttttttgtcgattaaggagaaattaaatgccagaaaaatactatcaagttggtaaaattgtcaatacccacggcatccgtggtgaagtgcgggtcattgcgacgactgactttacggattcacgatttaaaaaaggcgtgcaactggccgtcgaaatgcccaatggccttgttgatgttaaagtggcggcaatgcgccaacacaagcaattctatctattacagttcgaaggaatgggcaatatcaacgatgttgaacagttcaagggtcataatttaaagattgctgcaagtcaacgtgaagatgatctggaagatgatgagttttactacggtgatattatcggcttagaagtggttgaagaagccgatgggaccagctatgggaaagtctcagaaatcatcgatccaggtcccaacgatgtctgggtaatcaagcgccgtggccgttcagacttactcttaccatttttgaagtcagtcgttaagaaaattgatattgaagcgggtaaagcctacgttgaagtaccagaaggattgattgataatgaagattgatgtcttaagtttatttccagatatggttcaaaatgggttatcccaatcaattatcggtaaggcaattgatcgtgacttaattgatttagaagtgacggatttccgtgatttttcagtcaataaacacaattcggttgatgatgcgccgtatggtggaggtgcggggatgttgctccgaccacaaccgatttttgaggcgatggatcaagtgaatgccaagaatccggggcacaaacgggttattttgctcgatccagctggggtaacgtttaaccaaaaagttgccgaagaatttgctcaagaagaccacttggtttttatctgtgggcattacgaaggctatgatgaacggattcgcacgctagtcactgatgaagtctcattgggcgatttcgtcgtcactggaggcgaattaggcgcaatggtgatgatcgatgccatttcgcggcttgtacctggcgtcttggggaatgaacaatcagcggttacggattctttttcgaccggcttattggaacatccacaatatacgcgaccaccggaataccgcggtttaaaggtacctgaagtcttgatgaacgggaatcataagctcattaacgagtggcgcgagaagatgtccttgaaacggacatatgaacggcgtccggacttactagagaagatgacgttgaccaaggatcagttgcactggttacaagaaattaagcaagaagcggctgaaaaataaggcttttattctcagttgaattatgctaaaattaaaaattgtgatgattagtcacaaaacaacggtattccgctggcgcaagacgttaatgaatatctgtggaaaaaggagagattcaaaatgaatccattaattcaagaaattactaagtctcaattacgttcagatattcctgacttccgtcctggggacaacgtacgtgttcacgtgcgtgttgtcgaaggtactcgcgaacgtatccaattattcgaaggtgttgttatcaaacgtcatggtgttggcgtgagtgaaacttacacagttcgtaaaatcagtagcggtgtgggtgtggaaagaactttcccattacactcaccacgtgttgctcaaatcgaagttactcgtcatggccgtgtacgtcgtgctaagttatactacttacgcgcattacgtggtaaggcagctcgtatcaaagaagctcgtcgttaagatgacattaaaaaaggccgactcattacgagttggtctttctttatgtggattacaaagttaggtgatgacagatgaatcaatggatctacgttgttttatatcaagcaaacccactttattatgataaaagtaaaatgatccgggcgtttagttcggaacaacgggcccaagaatatgtggcgttgctcaatgagacgccatatgcgaatcaatcactaaaagagggccattatacttatcaaaagttgaacttaaactaatctaataaatgccacttataaggcgcaatctgatgcttctgcggagtatgggattgtgcctttttgggttgtggcactttcttgagggtcattaggagtgcaagtagtggttctaataatagaataaagacggtaaatccaagaaatccagctacggcgtagaatgcttcaggcgcaagtgtgagttgattaaagaaccgttcgcagcggtggttgaaggcgtttaatttttgttcactgccatcacgatcgactgcgtggtggacctttggatgccgacaaacttcaaagcggattggatttttttgatgattactagaaaagcgcatgcctttgccgaagaagtaagggcttacaaaaggcagtaaacaaagtaccaataaagatagaatcgcagttagtcgtttcattactagaacctcttttgtcttaatttcaaactaattataccataaattaaatgggttagcgcataaaaaaatagccctccgacgaggactaagcaggtgttcgataatggaaatgatagactttaaatgaaatgatcaagctaaccactaacaagaaaagggcaactagtaataaattagggactaaaatcaagatgatgtaagcgacgattgcacataagtatgccagtaaaatcaaattctgatcgagtgataataaataagcaacaatatgcaaaataatagcaataatgcacaaccaccatactttcgccatggcatccatataagtggggatgaatttcgtaacgtgggggttaaccactagaatgatcaaagattgtaaaaccgttacaactaagaaaattaagttgaataaaaacggtagtttgcgataagaaatcttcatattaataaacctctatcatttaagattctttaagtataacgaatttttttataaaaagaaatatgattcaataaatttaataattggtcaattaacggggaaaattgcgttattagcttcggattgatacaatcaggttaatttaaaacgagtaggtgatttgatgaatagtatccatttaatttgtttaggtgttcaggatttaaccgtgtcacgtcagttttaccaagcactcggctttcaagcgccgaatttagaaaatgctgagacaatcgtctttttcaataatactgggaccaagttggaattgtttccgtacactgcactactagccgatattggcttatccgcagataatcatccatttccaagaacgttcaacggcgtgatccatgcctttaatacgcatagtcaagcggaagtcgatgcaacatttaaaacagctctcgctaacggggccacgctcatcaaagcgccagaatggggcgagtggggtggctatagtggttatttcagtgatcccgatggttactattgggaagtcgcttactcaaaggactggcaatttgatcaagatgggatggtggtgatcgaatagaatgtgggcgcacgtaggtttttttgtgttttacgctgttcagttctttagaagtctgttataatgaataacgttctggagagttggcagagtggtaatgcaacggactcgaaatccgtcgaaccggcttataccggcgcgcaggttcaaatcctgtactctccttactataatggaaaaagcaaaacagttattgttttgctttttttttggtattttttaacagtttccccttattataggataagttacttagttttatttgttgaaatatgatattattaaccttaaggggatgagttaatgacagataaacattattacggcaactacgaagtggttgaagaacgggaatcgcaaaaatatgttgcaacgattaaaatacataatatggttaaaaaagtcgtgatgcaagatgatgctctgcaaatgctcgcacaaaatgatgttttacccgaaacggtggttcataatattattaaagaaccaaatttgctgaaggaacaagtcatcatttctggtgctaatttggcccaatacttagattaaactcaaaaataagaggggctagaacaagtgaattgttctagcccctcttatcatatttttaggcttcactgatgtcagcaaaggtggcttcagtgacccgctgtaagtcttgcggattaatctgaattgagcggccaattttaccggatgagacatagatgaatggttccttttcagcctgttggtcaatgtaaatcggatagtgggattgttcccagattccaacgggcgtgttagcgccatgttcgtagccagtagtggccacgagctcccttaatgggaccatcgcaatttttttgttgccagaaatttggcttaattttttttcgtctaaatgacaatcaatcgggacgacaccgacgattgggccggtactcttaccagagagcaccaatgttttataaataagatgttcatcgatatcgagatgatcgaccttcatttgggcaacgttgtggacttcctctgttgggaattcaagttgggtgtaggccactttttgtttatctagaattttttcaactaatgttttggataatgcgttttgctttttcttctttcccataatagactcctttaatgaatagtgttagtttacggcaatttggtttaaaagtaaatttaagactgcaatgataacgtttcgttgtataataaaattacataaggagtgatgatatgttgtggtttaaaaaacaaacagaaaaggacttacagtcccacgattttacccagttggtgaagcatgcgcgtaacgatgaaatgcattaccaaaagattcaagcgacatttgctggcttgaaaaaggcatatcaccaaccaaaatcgaatcaattaccaaaaaaagactaagttcgcgttgttggtgacagtatggcatactatatgtaataaataacgggtgggtgacacgatgaaacgacaaacttggcatttcctcttttataaatcagccttcacaaaagaacagattgaccagttattggcttatttaaaacaacaacaaaattttggtgggtttccgattgttgaattaattggtgatggcgatagtagtgatattcggtttgtcacgatggtttttgatccgttggccccgattgaagcccatctacaatcagaaatggctaagtttatgttgatgcatgccattcgcccagatggcaacacgccagaagctgatatgcggctatatggtcgtgtgatggcagaatctgatgcagcactcggaattgagttccaacgttatgacgatcagagtatggacgttatttattggggtcagaaccaagcagcacattaagtagaattacgattgaaagtctgggacattttgttctgggcttttttgaatgattgctttagattcaagtcataatcaggtatgatgttaatacgttcaactttaaaattgacttaaataacgactaattaaaaggatatggtgaatacagtggctgaaatggatatgttagcatttttcgatgcagaattagatgatttacaatttagtggggatatgaatatcaactgggacaaacaagctcgggcgattgaattggaattcacattaaacgtgactaaggaacaagcaattgccgttgaagatcaaaatggtgaattgaacgaatcggatgaaatcagttatgaagatgcgattttattcttcgatgaaagtaagatggacggctttgaatatgcagacaattatttagcagtgattccatttgctggtcgcaaggggttaaacgcacaagtcggtcggggctttttcaactatttacaagacttattagatgaaggcgaagatcaattagccgcttttgtgaatgatgaatcagacgaagaaacctttatcttaaactgggatgacactgttttccaagcaactgtcgctcaagcagatgatcaattagcgaaaaaatactacgcttaccctaaatactaagcaacccgcattaagaaggagacatgctacatggaatggacaaaagtaacggtcgctactgttaatgaagcagtggaagcaatcgccaatattttaacggaaaatggtgcggaaggaatccaaatcgaagacgcagctgattatgaacatttaaaggcaaagccagatcaaattattgatctagacagtattccccaccttgaaacgggtgctgcagtgagtgcctttttcccagaaacagtttttgtgccggaaaaattaccgttgattgaacaacgcgttgcccaattgactgactttgggttagcgattggttctggtaaggtgacattggcacaagtcgccgatgatgattgggcgacagcttggaagaaatattatcaaccaacgcggctaactcgcttcttaacggttgtgccaagttggaccgactatcaaccgactgatgaacgcgaagcactgattcggatggacccggggatggcttttggaacaggaacgcatccaacaacccatctatccgtgcaaatgttagaaatggttctacgcggcggtgaatctttaattgacgtcgggactggctctggggttttgagtattgcggctgcgcatttaggggtcaatgatattcgcgcctatgatgtggatcaagttgcggttgatgccgctaaggaaaattttgccctcaacccagtgactgctggcattgatgcccatcccaacgatttgttgaacgggattacaacgaaagcggatgtgattgtggccaatatcttagcagagattatcgtgcccttgattccccaagccaaggctttattgaatgacaatggacacctattactggccggcattattgcagataaagaagcacttgtccgtgaaacgttatcggcgaatgattttgttgttcaagaagcccttcatatgggtgactgggtggcattgattacacgccaaaagacggacgacgattaagaggagtatggcatgcaacgttattttattgatgaagcaattcaagtagaacaacaagtgaccttaacgggtgaaactgcacatcatatgctaaaagtgatgcggatgcagcctggtcatcgtgttgaattggtaacgccggatgaacaagcattcatcggtgaattaactgaactggatgcaactgacaaaacagtcaccgttacggtgcaatcgccaattacaaaatcagttgaattaccgattgagacgacgattgtatgcggcttgtcaaagggtgacaaaacagactggattgttcaaaaaggcacgcagttgggtgcacaccggtttattttctgtaatagccaattctcagtcgcacgctgggatgataaaaaacaagctaagaaagttgcgcggcttcaaaaaattgcgcaagaagcagccgaacaagctcaccggacgcatgtaccaactattgaatggcgcaacagtttaacggcggtcgcacaagaatcagcgacgattaaattagtggcttacgaagagtcagctaaagacggtgagcatgcccaattagttcagagcttacaaacagcccaacctggggatcgattactttgtgtttttggtccagaaggcggcgttgcgcccaaggaaattgagatgcttgcggcggctggctttaagatggctggtttaggaccacggattttacgggccgagaccgcgccgttatatctgttaagtgcgatttcgtatgtgacagaattggctactttatagtatgatagatgtaatctttttacagaggggcacaacatgactaaatttatgaataatcgttatttaaaaatggattgggtacgctatttattagtggccattctcttggcggtcgttttaccgctagtgtttggtgtcttgcacatcgataaaacgtggcggattggactgctattcatggctgtcaatggttgcgcagcctttatgattgggtatcgtgttcaaaagacccatgcagcttggtatcacattttgtacctgccgattttatttggattgatggtggttgtgcgctacgcagattataactattggttcgttcctatttattgtttattaagttacttaggaattaatactgcgtatgaacgccgttaagcaaactgactcgacagttaattagttgagtcagttttgttgtattcagtacatttttaatcgagtaagaggaattggagtgaggcaggatgccagaagaaaaagtaatttcacagcaggaagtgctacagttatgtcagaaatacatgaatactgagcatcttgcttttgtccaaaaagcgtatgattttgcagcttatgtgcataaagaacaagttcgccaatcaggtgaaccgtatattattcatccaattcaagttgcagggattcttgctgaattgaagatggatcccgcaacggttgcttctggttacttacacgatgttgtcgaagatacgaatatcacgttaggtgatgttgaagagatgtttggcaaagatgttgcggtaatcgttgatggtgtcacgaaattaggaaaaattaaatataaatcacaccaagaacaactggctgaaaatcaccggaagatgttattagcaatggctaaagacttgcgggtgattatggtcaaactcgccgatcgcttgcataatatgcggacgttgaaacatttgaaacccgaaaaacaacgccgaattgctaacgaaacattagaaatctatgcaccattggctgaccggttagggattagtaagattaagtgggaattggaagatatttcgctccgttatttgaacccacaacagtactatcggattgtgcacctgatgaattctaagcggacacaacgcgaatcttatattcaagaagcaattgaagacattaaagactcaattgctgatttagatatgaattacgacatttatggacgaccaaagcatctttactcgatttatcgcaagatgcgcgaccagcataaacaatttgaagaattgtatgatttactcgcaattcgggttgttgttgactcaatcaaggactgctatgctgttttaggagcaatccatactaagtggaaaccgatgcccggtcggtttaaagactacattgcaatgccaaaggccaacatgtatcaatcgatccatacaactgtgattggtcccaaaggcaaaccgcttgaagtgcaaattcggacgcaagaaatgcacgatgttgctgaatatggggtcgctgcacattgggcgtataaagaaggcgttaaggaacagattaagctggatgaatcagggcgtaaactcgatttattccgtgaaattcttgaaattcaagatgcttccgatgatgctgcagaatttatggaaagcgtcaaaggcgatatctttagcgatcgcgtttatgttttcacacccagaggcgatgtttatgaactaccaaagggttcagtgccactggattttgcttatttagtgcatactgaagtcgggaaccacgctgttggagctaagattaacggcaaaattgtaccgttgaactatcaattacgtaatggtgatattgtcgagatgttgacgtcaacaagtgcgacaccaagtcgtgattggattaagctcgctttcaccgcgcgtgctcggaataaggttaagcgctactttaaaaaagaagatcgggatgaaaacgtcgaaaaaggacggacggctgttgaacatctgttggtagaagatggttatacaccaaaagaacacctcactaaagccgagatagctgtcatcctaccacattttaattttaatgccgaagaagaactgtttgcagcaattgggttcggtgaaatctcaccacagtcagtcgtcaatcgcttaacgattaaagaacgacgggcaaaagaagaaagtgaacaaaaagcattagaagctgagattctatcagcgaaggattcacaacaaccagggcctaaagcaaatggtagccatatcacaatcaaacatgaagacggtgttgttattgaaggtgtcgacaatgtcttagtgcacttgagtaaatgctgtaatccagtccctggtgatgatatcgttggctatgtaacaaagggacgtggggtttctgttcatcggcgcgattgtccgaatatcgttgatcgggcagatatgaacagtcgattgactgaagtcagttgggaaaataccaacgctaagaatgatcaactctatgatgcgaatttggaaatctacggctataaccgtggtggactattgaacgatgtcttacagtccttaaatgcacatacgaaacagctaaataacgtgatggggcggattgatcacgataagatggcggatattcatgtgacagtcggcattcgcaatacagatcatttagaaacgattatggaagccgtgaagaacatcccagatgtttacgaagtcaaacgggttcaaggataggagcgacttaatatgcgagtagtattacagcgagtgagccaagcaagtgtcacgattgatcagacgattgttggcaagattaaccaaggctttttgttattggtcggtatttgtgatgatgatactgaagctgatttagattacttggttaagaaaattagtcaattgcgcgtttttgaagacccagatggcaagatgaatttggcgttggcccaggttgacggtgccattttatcggtgtcacaattcaccctttttgctagcactaagaagggcaatcgcccaagctttactgcggctgggaaaccggactatgctaaacgcttatacgaacagtttaatcaaaaattagcagcgactgggattcgcgtcgcaactggagaatttggagccgatatgcaggtagctttggtcaatgacggtccagtcactatcctatttgatacaaaggagaatggataattaatgagttatcaaaatgcgatttgggatttcgatggtacattgtatgatacttatcctgttatgatgacggcgctcagtcaggtttaccgtgatcatcaagtcgcagtcgatcaatcgcacttataccaagcgattaagcagacttcaattaaacgggaactgcagatgcttgctcagcaaactaatgtttcatttgaacaattggatcgagaatatcatgaattagaacaccaattacaacagacgccacaaccttatccgggggcagcggcgattttgaaacagattagtgcacatggtcagaatttcttattgacccatcgtgatgatgctgcagaaaaatttttggcagcgcatggactagcggattattttactgaaattgttacgagtcagagcggatttgccaggaaaccggcgccagatagtttgaacgatttatgtgatcgttatcagctggataaaactaaaaccgtgatgattggtgatcgtgcattagatattgaagcagggattaacgcccatgtggcgacggcctatttcgatgttgatcgattgccaatcatggtgcaaccgacaatcacaattacgcaattaagcgcgttagggaaatattttttaaactaagaaaagcggtgtcgacaaattgaaagagtcgacaccgcttttttggtttaaaggagtgtgatgattagaaaggataggtaccatgctgtggccatcacgaggacaaagcgccaccaactccgtagaaacttacgtaggtacagcgcacggtcgtagtaaaagcgcgttaagctccagatgattccccacagacagatagctaagcaaaagaaccagccagctttactgaaaattggcatactcagaaagatagcacttactagcaatggaattggtagccaattaatataatgaaaacgatgtttaaatagacgctgagtcaaccggtcgatacagtagccgagtgcgacacagacgggcggtaagcctgcaaagaaaagtgttgtgctaaatggcatttaaatcacctcgaaagttaatagtcccattgtaccgtcttttggaaaagataaaaaggactgagttgcactttcaagtgattcggtgtaaactgctgataagaaaaaagtctaggtggtggaataattgaagaaacaaacaagcacgtttagtcgcattactaaaattttcgtttgggtaatgttaatcgccacagtgggctcagtcatttttggttcactcgctgcaactggcattttaaacttctaaaaattagattaaagtgagcaattttttgcggcgttgcttagaagtggtgcgacagcccaaaataagcttacttaattaacaagtgaaacggccatttcggttaacgaaatggctgttttttttggtcaaaaaggctagtaatataaatatcgtgtacaattggttccaaaatgataagattttggttttttttggcaaaatgtggtagaaagtgggggattgtggtagactaaaatcagttaaggtgggcaaaggggtgaatggttatgttcatgggcgaatttcatcacacgattgatacgaaaggtcggttaatcatgccggctaaatttcgtgaatcattaggtgcggaatttgtactcacccgtggcatggacaattgtatttttggttacccccttagtgaatgggaacagttggaagagaagttaaaaaaactgcccctcgctaaaaaagatgcccgcgcgttcgtccgctttttctactcagcggcggtcgaatgttcccctgataagcaaggtcgggtgaatatcccagacacacttgctaaacatgctggtcttgaaaaagaatgtgtgttaatcggggtctcaaaccgcattgaaatttggagccaggaaaaatgggcgagctttagcgaagaagctgaagagaattttgatgatattgcagaaaatatgttagattttgatttttagaaggatggtaaatagatgacagaaacatttaaacatcaaagtgttttattgaaagaaacggttgatgccttgaatgtgcaacccgatggcgtgtatgtagacgcaacattagggggcggcggccatagtgaatatttgttatctcagctgacgaccggtcatctttattcgtttgaccaagacgatcatgccttagcaagtagtaaacaacgattagccaaatatgctgaagcgggccaagtgacttttattaagagtaacttccgctatttaaaagcagcgttagcagaacacggtgtgactaagattgatggtattttatacgatttaggcgtatcatcaccacaatttgatgatgcccaacgcgggtttagttataagaaagaagccccacttgatatgcgaatggaccaaggggcggaactcagtgcctacaatgtcgttaatgagtggacctatcaacaactaattaagatctttttccgctacggcgaagaaaagttctcaaaacaagttgcgcggaagattgaacaacaaagagcagttgcgccgattgaaacgacaatcgaattagctgatttgattaaagaagcaattcctgcaccagcaagacgaaagggtggacatccagcgaagcggattttccaagcgattcggattgcggtcaatgatgaattaggggcaattgaagattcactcgaacaagctattccattggtcaatgtcggcgggcggatcagtgtcattacgttccaatcattagaagatcgtttggtgaagacgatgtttaaggagcaagcaacgctcccagatttaccgaaagggttaccaattttaccagaagaacaaaaaacggttctaaaattagtgaaccgcaagccgattctaccaacagatgatgaattagaagaaaaccatcgtgcacatagcgctaagctacgtgtcgcagaaaaacaaaaagaaattgactagaaggattgatgatgatggcaactaacacggcacgccaattagaaacgccagtagcaccgctaaaaacgcagcctactgcacacaaacaagcagttgcaagccagtctaaaaaagtggctttttcagctgttgaaaaattagcgacgtcagttattggaattatctttttcgcgatgttggttagtttgttaaccaccaaaattgcagttgttaatgcacaacgaggattagaaagtacgactcaaaagatggcccaagtcagcgctaacaataatgatttaaaacaggagatcggtgaattaacaagctctgaccgtctgaatgcttttgcccagaaacatgatcttaaactaaatgaaaataatattcggaacgtgtctaaatgaaatcagttaagacacgtaagagtccacggcggaatcgacgcgtttttggcaggcttttattgctaattatcgcggcgatttttctagttttcgccggtcgttttgcttacattgctgctactgggcatattgcaggggtggatttaacgaaacaatcacagaaaaaatacaaagctgattccgtgattcgcgcacaacgcggtacaatttatgattctttagggaacgttttggcacaagacattaacgcctattcagtgtatgcggtattaagtcacgattacgttggtcctaataagaagccgttatatgtaactgataagaaaaaaacagcgaaagttttgagtcgctatctaccattgagtgaagaaaaaatctataaacaattaacgccagctaaccgttcagtttatcaagttgaattcggaagtgccggccaaaacctttcactgagcatcaaacggaagattgaaaaagaacatttaaccggtatttacttcaatgagtcccctacgcggctgtaccctaatggaacattcgcatctcacgtcattggtatcgctcaatcaccaaaggacgaagacggcgctgatcaaagcctcgttggtgtaatgggaattgaaaaatacttcaacaaacaattagcaggccaagatggttacaagaattttgcccgtgattcctatggatacacgatcaatcaaaagaaaaacaaagtaaaagccgctaaaaacggccaagatatttacttgaccttagattctcggttacaatcatacatggaaactttattaacgagtgtcaataaaaaatataagcctaagagtatgaatgccgtcttgatgaatgctaaaacgggtgaaattttggcggcttcacaacgaccaacctttaatgccagcactaaaaagggaattggcaagatttggcgagatacattagttgaagatggctatgaaccaggctctgttttgaaaattgcaaccttggcagctgccatcgactctggtaattacaatcttaatcagtattatcaatccggttcgattggagttggcgataagaaaattagcgattggcaaacgagtggctgggggatgattccgctgagtcaagcctttgcacgatcaagtaacgttgggatggtcaagcttgaacaagccatgggtcctaaggtttggaaagactacattcagaagtttggcttcttaaaaccaactggtattcaattacccggcgaaacagaggggacattgcaatatgttcggccactagatcaggccacaacttcatttggtcaagggattaacgttaatgtaatgcagatgcttcagatgacaagtgcgattgcgaacgatggcacaatgattaaaccgcagattttatctgggattaatcaggatcatcaagtaaaaccaatcaaagctggtaaaccaattaaggctagcacggccaaatctgtcttacaaaatatggaagatgttgtttatcaagattatgggacgggtcaggtttaccaaattccagattataaagtagccgttaaaaccgggaccgcacaaattactggtccagacggtggctatttaaccggcgcaagcaattatatcttctctgtatcagggattgcaccagctgatgatcctaagtatattttatatatcacaatgaaacagccgcagaatatgacagatagtgctgaaagtattttggcacaggtcttcaatccaatgatgaaacgggcactggagtataccaaaaaggctgaaaaagacacacaacaacaagtaacagttccgtctgtgattggtcaatcaacggatgaagcacaaaagaaattaacggatttaggcctacaaaccgcttctgttggtagtgggaacttagtcgtccagcaattaccaaaggccaatagtgtgattttacctaaacagcgagtcattttaatgaccaatggggcaatgacgatgccagatgtcacgggttggtcgaaaaatgacctcttgaagctcgcgcaattaacaggtgttgagattgacatcaaaggtagcggatatgcttatcatcaaagcctagcggtcaatgggttgctagatggggttaaaaaaataaaagtacaattaaaataagatagttggattaaaggagtttatgaaatggcagcaggacaatttttagtgcccttaatgagtgggtttgtaattacggtgatttttatgccgctttttatcgggtatttacgctttaaaaaagaggggcagacaatccgtgaagaaggccccaaatggcacgctaagaaaaatgggacaccaacaatgggcgggctcttattcattattgccgctgttgtttcaagtatttgggtaggattattcttaaaacagttaacgaatagtctattaattgccatgtttattctggtgttatacggtattctcggtttttcagatgattttattaaagttttccgtaaacagaacttaggcttacgcgcttggcaaaaattgttagggcaaattattggtgggattgtcttcatcgctgtttatttccatgaaggcttcagtactgcacttgaaatcccagtaattggcactatttcaagtaactggttcttttgtatattcgtcttagtgtggttagtcggtttctcaaatgcggtgaacttaacggatggcattgatgggttagttgctggcttggcaaccatctcatttgcaacttatacaattatcgcctttcatcaaaaccaaattgatgtcgccattttcggcctcagcattattggcggattgcttggctttttaatctacaataaaaaaccagcgcaaattttcatgggtgatgttggttcactagcacttggtggcgcactagcagccatgtcaattttattacatcgagagttctcactgctattggtcgggttagtatacgtcattgaaacagcaagtgtgatgttacaagtcggttcatttaagttattccataagcggatttttaaaatgagtcccattcatcatcacttcgaaatgtcagggtggagtgaatggcggattgatatcagcttttggttatttagtatcatctgttcagcaatttatctgttaattttttagaagagggcgaatttaatgaaggccagcacgacgtatcaagatcaggcagttttagttttgggattagggaagagcggctttaatgctgctaaattgttattaaaattaggggcgattgtgaccgtcaatgacggaaaggaacaagaagacaatcctcaagttgcacaattgcgtgaattaggggcaaccgtcattactggatcgcatccattggcgttatttgagcgcaactttgcatacctcttcaaaaatccgggcattcgttacgataacccaatggtggcagaagcgattgcgcgcaagattccagttttaacggaaccagaacttgcatacgaagtgtctgaagcccaatgggtcagtgtgactggttcaaacgggaagacgactaccacaacgttaattacgttgatgttagatgaaaatcgcacccaggggcacgcatacgctgcgggcaatatcggcattccactaagtgcggtcgcccaaaaagtgacggctgccgatgtgatggtcacagaattatcaagtttccaactactcggtacaacaaccgttaaacctaagattgcagttttaacgaatatttatgaagcacatttggattatcatggctcgcgtgcgaattacgtggctgcgaaaatgcgacttgttcaaaaccaaacggctgacgacttttttgttgtcaactgggacttacctgaactacgtgaattgagtcgccaaactaaggcgcaagttgtgccattttcacggctaggcaactctgaagctggcgcctatgtcaaagatggccaactttgttttaagggtgaagtgataatgccagtgactgatattaacgttcctggtgaccacaatattgaaaatgctttggccgcaattgcggcggctaagctgatgggccaatcaaacgatgcgatcattgatgttttaacgacctttaccggcgttaaacaccggatgcagtttgtgacgagctatgaaggtcgccgcttctataacgactctaaagcaaccaatatggaagctaccgaagtcgcgttgaagagttttaaacaaccaattgttttattagcgggtggtcttgaccggggctttactttcgaaccattattaccactactaaaagaacacgtaaaagcaatcatcttatatggtgaaaccaaacaattattggcacagacagcacgcgaagcaggtattcccgtcatcaaaatagttgataatttaacagaagcagtgcctgaagcttatgctgctagtgaagccggcgacgtggttttattgtcgcctgcatgtgcgagctgggatcagttcaagacgtttgaagaacgtggggacgtctttattaaggcagtcgaacaaattacagattaaattggagattctaaaatgagagtaatgatatctggtggcggaactggtggccacatctatccagcgttagccctaattgaaagaatgcaacaacgcgacttgttggatgccgttttatatgttgggactaaacgcggtttggaaagtaaaattgtgccagatcaaggcatcgattttaagacgttagaaatccaaggatttaaacgttcgatgaatatgaagggcattaaaacaaatattaaaacaattcaacttttcttgcgcagtgttaaagaggcaaaagaaatgattaaaacattcaaacctgatattgtgattggaacgggtggctatgtttctggggcattgctgtatgcagcaagtcgcttaaaagtgccaacgttgattcatgaacaaaactcagcagccggggttaccaaccgctttttggcgcgctttgtcgataaagttgccatttcctttgaatcagtcagcgaccaattcccaatgcacaaaattgtattaacaggcaatccgcgggcccaacaagttgctggaatgttaccaaacgaacgtttaagtgaattcgggcttaagactgacagtccgacagtgcttgtgtttggtgggagccgtggtgcaccaagtattaaccaagcttttatcgatgcagtaccagcacttaatacaaaagagtatcaggtgctattcgtttctggacgggttcattttgatgacgttcaagcgcaattaaaggcgatgacgctcaatgataatttggctgttgtaccatatatcaacgacatgcccgaaattttaccagatttaaaggccattgttggtcgtgctggtgcgacgagtttggcggaaatcacagcacttgggattccgtcaattttgattccaagcccctatgtaacaaatgatcatcaaacaaaaaatgccgagagtttggttaaagaagacgcagcgattttaattccagaagcacaattaacgggtgacaaattagtccaatcattagatacgctttttgcaacccctgatagtcaacaagccatggctaaagcagctaagaaaatggggattccagacgcttcagatcgcattattgaagtgattaatactatcatctaagttaagaagggggcggatgacttgaagaaaaaaacaactaaaaatgggtcgctcgatccgctccaattactaaacgtttggcgcgcttatcaactaaagcgttggaagaaacaacgtcggcaacgattaacgcctgggcgaccaacaattagtggtcaactaccacatctaaaagcgcaacgaacggcaaagacaaagtggcggttgacagcgttattgagcaccttcacattgggcgcttgtgtggcaatctattttatgttgccgattagcgacgttcaacaaatgacggtcaacgggactaaatcagtgcctgatcaacaggtgattaatgcgagtggcgtacggattggcgataacgtcctgacacaaatctggcaggaaaaagcgattgagaagcggattcaccagaaactacctaaggtgaaaagcgtaaatgtcaaagttgatcagtttaatcaactgacattggcgattaaggaatatcctacggtgggctatctagtgcggcataaacaatattatccaatcttagaaaatggcacgattttaaagacgaaaatgacgcagtctctcggcaatagccctgtctatagtcaatttaaaaatgacgccttcttaaagcaagggttaaaactatatcaagcttttccaaacagcattcaaagtgctgtgtcggaaattcgtttaacagctaagaacaataatccttatcaagttcacttatatatgaatgatggtaatgaggttgttggggatttgcggacacttgccaagaaaattaaatattatcccacactggcgaaacaaatggacggtaagggacgaattgacttagaagttggcgcttacgccaaattatttgataattctgaggctgattcaataaaaaattagttaacactgtttaaaaagattggattggctttctaaatctagtcgaaatatggtactatttagcataggaatcattttattctaattgaatgcaaggaggttccacacacttaatggagaattcaaaaatatatgtcggtcttgatgtcggaactacttcaattaaggtaattgttgcagaatcaattaataaacaacttaatgtgattggcgtcggatcagctagatcaaacggattaagtcgcgggacgattgtggacattgatcaagcggttaccgctatccaacaagccgtacaacaagcagaacaaaaagcaaatattgaaattaatcgggttgttgctggaattccagccaaccaactacaaatcgaagaatgccaagggatgattgcggtctctgatcaatctaaggaaattactggtcaagatgtgcaagacgttgctagtgccgcattggttcggaatttaccacctgaacgtgaaatcctcaatatcttaccgcaatcgtttacggttgatgggtttgatgggattaaagatccacgcggaatgatgggggttcggcttgagatgaacggaattttgttcaccgcacccaagacaatgattcataatttaaagaaatgtattgaaaaagcgggtttaacactatcacaactcgtagtgaacccattagcacttggtaagctagccttatcagacggggaacaagattttggggcaatcgttgtcgaccttggcggtggtcaaagtacagctgctgtgattcatgatcatcaattaaaatttacggcgattgatcaagaaggtggcgaccatatgaccaaggatatttccgtggtcttgaacacgtcaattgaaaatgctgaaaaagctaaacgagattatggcaatgctgattcattggctgcttcagaagaagaacaaattccaattgaagttgttggtcaagccttaccagtgcaagtgacagagaaaaaattagctgagattattgaagcacggacgatgcagatttttgatcgtttgaaagctgaattggataaagtacacgcttttgatatgcctggtggggtgattatgaccggtggcgtgacagctttacctgggattgtcgacttggctaaggaaatctttaattgcccagtgaagttatacattccagatcaaatgggcttgcggcacccatcatttgcccaagggttgagtttaattaactacatagctaacttgtcggaagttgattggttggtccaaggcgcacttgggaatgtagcacagactgaattagaccaaacagtgacgaaatcaacaatgaaatctcaagcaacaaccaaagaagtaccaagtaagaaaaccaaacctaaaaatcaatcaaaaaatgcattcgaaggcctgaaaaatttctttagtaacttttttgaataagggctagtcgtaacaggaggaaaaacagatggaatattcattagatgcagcacaagaaaatagcggcgcaatcatcaaagtaatcggcgtcggtggtgctggtggtaacgctgtcaacagaatgatcaacgaaggcgttaaaggcgttcattttattgcggctaacactgacgttcaagcacttgaagattcaaaagctgaaacaaagatccaattaggacctaagttgactcgcggcctcggtgccggcgcaactgctgaaatcggccaaaaagctgctgaagagagtgaagaagtcctcaacgaagccttaaaaggcgctgacatgatctttgtcacagccggcatgggtggcggtaccggaactggcgctgcccctgttgttgccaaaattgctaaagatcttggcgcactaacggtgggggttgttactcgtccatttacatttgaaggccctaaacgtggtaaaaacgccgcttcagggattgctgaattaaagcaacatgttgatacaatggtcatcattgctaataaccggttactcgaaattgttgacaagaagacaccaatgatggaagccttcaaagaagccgataatgttttacgtcaaggggttcaagggatttctgacttaattacatcaccagggtttgtcaacttggattttgctgatgttaaaacagttatggctaaccaaggctctgccttgatggggattggttcagcaacgggtgaaaaccggacagctgaagcaacgaagaaggctatttcatcaccattattggaagtttcaatcgatggtgcagaacaagtcctcttaaacatcacgggtggaccagacttgtcattgtttgaagcgcaagatgctgctggtatcgtgcaacaagctgcaactaacgatgttaacttgattttcgggacttcaatcaacgaaaatcttggtgatgaagttgttgtaacggttattgcaactgggattgatgaagataacaacaaacgtcgtccagcaacaaacaattcagcaccaaagacaacagcgccttcaacaccatcagaacaaaataatgatccatttgtagattgggatatgcgtcgcgaaccaagtgcccgcgagcaagcgcaagcaactgaaaaatttgatgaaattgaaaagaaagatttcgatatcttcaaacggacagcccaagcggatgataataagcaagataacccaaatggggacgatgtgccgccatttttcaagcgccgtcgcaataactaaggaggatgactcatggctggtaagtttagtcttagcaattttttcggcatgtcagatgaagatgaatatgctaatacgcaagaaactgcggctgtcactaatgaaggtgaaccaagtgttcgcccgaataacgtcgtctcgatgcaagctgcgggagctactaaaatgaataaaattgtcttatgtgaaccacggatttattccgacgcaaaaaaagtcggcaaaagtttacttgaaaataaagcagtgattgttaacttcacacgaattgaagcgacacaagccactcgaattgttgatttcctaacaggggcagtttttgccatcaacggtgaaattcaacgggttggtgatcagattttcttatgtacgccaccgaactatgaaatcgatggtaatctttcagatattgtcgatcaaaatgattttgatattgaggtgaactaggtgcaactatttttattttatgtgctcttgatgctcatgtatgtggtacggatttatagtggcatcgtcgtaatctattgtttattaacgtggattccagaggcgatgggcagtaaattagggcgctttgttgctaagttagttgaacctttcttagaaatctttgaccgcttcattcctgcaatcggtggtattgggatttcagccattgctgcgtttttcgttttatatttagtagaacgtgggatcggcttactcgcacaattattagtggggatgtaatcaatggtcaatcaagcagatgtctatcaacattttagaaaaagcgaggcgccatttgttgcgcaggttttggattggattgagcaagcacaagttgaatatcgaccaatcttaacggcgtttttagatccgcgtcaagcgtttattttacaaaccttggtcggtgaaaaaggggacgtccgttatcactttaatggcggatataacgctgctgaacggaaacgggcaatgattgctccagattactttgaaccaacggatgcggattttgagattcaattatttgagattcggtacccgattaaatttgcaaacctatcacatgggaaggtgcttggcacgcttgtgaatgctggcattgaccgtgatgtttttggggatattatgaccgatgaagaacgctggcaattctttgtgacgaagaagatggcaggctatgtcgaagagcaaatcactaagattggtcgcgtatcagttcatttgcaagaacaagactatacacagttgttgacgcctaaggacgcttggcaattcgaacaaacgactgtcagctcgtttcgcttggatacgatcatttcaactgtttacaatctgtcgcgacaacgcgctaaagaattaattcaagccaacaaagttaaactgaattggcaagcatttgataaaccagattttgaattagcactattagatatcgtctctgttcgtggttttggccggattcaactccaatcgattgatggtcagactcgtaaagaaaaatatcgagtgacactggggattttaagaaaataattgctgaaaaagatggaggaatttcaaaatggttttaacacctttagatattcataacaaagaatttaacacaaaaatgcggggttacaatccggatcaagtcaatgatttcttagatcaagtgattaaagactacgaatcagttttaacagaaaatgaaagtttaaaagcggaattaaaatcaagcgatgaaaaagtaacgtattttaatgaattgaaagatgcgttgaaccaatcaatcattgttgcacaagaagcggctgaccgtgttaaagataacgctaaaaaagaagctgaaatgattcaaactgaatcagaaaagaatgcaaaatcaatgttggatgatgcaactgaaaaatcaaaccacatcattgacgatgcaactgaacgtgcaaaacaaattgcaatcgaaaccgatgacttgaagaaacaaacacggattttccgtcaaagattacaagttatgcttgaatcacaattagaagtggttaagagtcctgaatggacagatttattagctaaagatgatttagcggaccatcaagctctttcagctgaaattgatatgacagaccttgacaaccatgggtcaaatcaagtaaactcggatgcagaagttaaaccttggggtcaaattgctgaagatgatgtgacaacaacgcaaaccattattttccctggtgaagaaacaccagtcgaagaagatgacaatgatgaagtactctccgatgtagtcgaagacaccgattcagatgaagtggttgaagctgttacggattcttacaacccaattgaaaaccaagcaacagatttaaataaggactagcaagcaaaacatcatttaagcgagccaacgacggtggaaggttggtaatgctctgtttagcggtgtatcaccttatttcattccagatgaattgagtaatttgggacgcttaatgcgcgttattgcatgttgaggaaggtcattgaccttcaaatttaggtggtaccacgaagatttcgtcctattcagggcgggatctttttttgtttttaaaaataaaggagtgatttgatgcgtatcaaagaaacattaaacctgggcaagacagctttcccaatgcgagcaggtttaccgaatcgtgaaatcgattggcaaaaaggttgggccgataacaacctctatcaacaacggcaaaaattaaatgaaggtaaaccttcattcgttcttcatgatggcccgccatttgcgaacggcaacatccacatgggtcacgccttaaataaaacaagtaaagatattatcgttcgttacaaagcaatgaacgggttccgcgcaccttttgttcctggatgggatacacatggtttgccaatcgaacaagccttggctaaaaaaggtatcaagcggaaagaaatgagcctcgttgattatcgtaaactttgttacgactatgccatggaacaagtcaacaagcaacgcgaagatttcaagcgtcttgggatttctgctgattgggataacccatacatcactttaacagctgattttgaagctgaagaaattcgggtcttcggtgaaatggctaaaaaaggttatatctataaaggtaagaagcccgtttactggtcaccttcatcagaatcaactttagcggaagctgaaattgaatacaaagacatcaagtcaccatcaatgtacgtggcgtttaacgtggtggatgggaaagacttattagatgcggatacaaaattcatcatctggacaacaaccccatggacaattcctgctaacttagggattgcggttaacccagctttcgattacgttcaagtgttagctgacggccaaaaatacgttgtggcagcagaacgtttgaacaagatgactgatcttcttggttgggaatcagttgaaatcttgaagactttcaagggtgctgacatggaattaatgacagcccgccacccattatatgaccgtgaatcattggtgatcttaggcaaccacgtgacattagaaactgggactggtttagtgcatacggcaccaggtcacggtgaagatgattataacgctggcactaaatataagttaccagtcctttcagtcgttgacagcaaagggattatgactgaagatgcccctggttttgaaggcgtttattacgataaagccaacccaatggtgacagaagcgcttgaaaagaacggttcattattgaaactcgacttcttcacgcatagttacccacatgactggcggacaaagaaacccgttatcttccgggcaacagcccaatggtttgcttcaatcgatgcgttccgcgatcaaatcttagcacaaatcgaaaaagttgaattcatgccagaatggggaaagacccgtctttacaacatgattcgtgatcgtggcgattgggttatctctcgtcaacgggcatggggtgtgccattaccaatcttctatgctgaagacggcacagaaatcgtcatgccagaaacaatcgaacgtgtggcgcaactctttgcagagcatggttcaaacgtttggtttgaatgggatgctaaagacttattaccagcaggctttacacatcctgggagtccaaatggtgaatttacaaaagaaaaagatatcatggatgtctggtttgattcaggttcatcacatcaagctgtgttagcggctcgcgatgacttaacttatccagcggacttaatcttagaaggttcagatcaatatcgtggctggtttaactcaagtttaattaccagtgttgcagttggcgaagtcagcccttataaagctgttatttcacaaggctttgtcttagatggtaacggtcgtaagatgagtaaatcacttgggaacacaatcttgcctgaaaagatcatcaaacaaatgggggcggatattgtgcgcctctgggtcgcttcagttgatgctagctcagacgtgaaagtcacaatggaaaacttccaacaagtcggtgaagcttaccggaagatccggaacacaatgcggttcatgattgcgaacacaactgatttcgatcctgctaaagatacagttgattacgcagaattaggttcagttgataagttcatgttggtgcgcttaaacgcaatcatcgccagctgtaaagcggcgtatgatgcttacgactttgccacagtttataagacaattaacatgttcttgacgaacgaattatcagccttctacttagacttcgccaaagacgttgtttatatcgatggtcaaaatgatgcacctcgtcgtaacatacaaactgttttctatgcagtagcagtagccttgacgaagttattgacaccaatcttgccacacacagctgaagaaatctggagctacttacacgaaccagaagaattcgttcaattagctgaaatgccagaagttgaacattttgccggtgaagaagacttagttgaaacttggaacgccttcatggggattcgcgacgatgtcttaaaagctcttgaaacagctcggatggacaaggtcatcggtaagtcattagaagcggccgtaacactttatcccaacgaagccaatgctgctttattagcttcattggatgctgatgttaaacaattattgattgtctcacaattaacaattgcggatcaatcagccgatgttccaacagaagcgacacaatttgatggcattgcggtcagagttgcgcatgctgagggggacgtctgtgatcgttgtcggatgattaagactgatatcggttcagatgataagttcccaatgctttgtgcgcgttgtgctgcaattgtcacagccaactacccagaagcagttgcggaaggtttagaaaaataataatcactaaaagcggtgcgaacttttacgttcgcaccgctttttttgtgcagtcaagagtaaatagataacgttttcatgataaaagattaatctttgctaataatttcactattaatgattatttgttgttagaatgaaaatagtaatcggaacgggtgggtaaatgacacgacgacaagcgactaagcgctatatggcaatgattttaatcgaattattaatggatcaaaaagcgacgaaattgacggtcgcgacttttttgaagacggctaatttatcacgaacgaccttttataatcattttccaacgggcatgtgcggcttattttggtggacacttgaacaacaaattattcaaaaagttgatgagagtatagtgagtggcgattgggaatccggctgtcatgaagccattcaatttattacacggtatcgcatgttttgcttgaatttatatcatctagcggattatccggaacgccgccgcttttttgaacaggttatgaaacagattattcataaggcattgcgccattacaaagcacaatacacgccacaacagttaaatcacttggaagacttttacggcggtgcaatcattcgccaattagattgttggtttgaaaataatctgcagaccgaaccggaggtgattgatgagcggttatgttttaatttgaagcagcttgagaaaatcgttaaaagtgactaaacaatttagtgatattgttcactttccggacaattcgctgaacttgtaactggaatgctgcccaggttttgctacactaaggatgtaccaaaaaataatattaatagcaactccacacaacgaaaagccctaccatatttggtagggctttttgtatgcgaaaaaggtagcggttacattaatggcgtaaccgccgccttcaattgaaattaactattatttctgatcttttgctgcgtattcagcatttctttttttcatttggaatgcataccagatgaagattaacaaatatgctgcaagtgctgctaaggcatagagaacaaatttaatatctccttggctagcgttaccaactaagtagcctaagaatttttcaataggaccttccatcgttgtatgagagattagagcgctttgtgaaattccttttggaaatgcaccaacagatttcgctgttgctgtgacaaaaggtgctgataatgtaccagcccaaaggaagataggcaattccaaggctccaataataatcattctaagaaccttaccacgagtaactactaatagtgctggtgtaacacccatggcaataataccacctagtggtaatagtttgttgcctggtaaaacgagtgcttcaagtaacataatgggtgctaaaacattggcagcagcccaaacttcggcacgtccagcaataaatggccaatctaaaccaatattgagtttgcgcccttggagtttactgttcgcaaaatttgtaattccttgagaaagtggttcaacagctgcaataaaccaagaaccgattagtgagaatagttccaaacagaaagccgctgtaaatgatagggcaaaaatttcttttggtccttgtccagaaagaagtccgatgaaaattcctaaataaatcccaattgcaaatttactaccccagaaaccgatttttttgtttaatttagcagcatcaaaatcgtatttatctaaccatgggaataatttgtcaaaaatcttatcaaagaccatgataacagggttcatcatgtaattcatatgtgttgttgtcattgggtttgaatctggtgcgtttaataaatcattgaacgttggtttcatcaagtcagagttgataatcttaagaacgccgatgaaaatgactaataatgttgcaatgattaagttagcgccacagtagattgagaataagccaacgaaagcaaggtgccagatatcaaagatatcaacatctaatgtgtttgtcttcttcaaaatcaacatgacgatgttgacaatcaccataattaataagaagtaaagggtgtatggtgaaccccaagtgatagttgcaagtggtgcccaaccaacgtcagttgctgagaggttaatcccagttgacttaacaaattcggttaaggcgccttggaatgaggttgttaacaccccgataactgccccgatagcagttaaagcaatcgctaatttaatcccaccttctaaggctttagaaagtttaactttgaagagtaatgcgattaacgttagaacaatcatcatcattggtgcggcaccaagatcaatgattggttggaacacaacattggcaaaatggatgatagtagacatagatacatctccttagattagcaaaagaactgctttatttgttcagatttttgattgcctcttcaacttgatcaaatacaggtgctgccattgcaggaatccgatagagaatagggccagcatcaatcactggaatggatggttcgaaacctaaatcagttgcagcaattggtgtaaagatatcataatgttgcatcatttcttctgtgatgtccttaaccataacggcgtcagctgtcacttcataaccacgatctgccatttctgtttctaaagcactcttaatttggtgacttgagttaacaccagcaccacaagcagctaaaattttaatcataataaaaaccccctaattaattttgaaaatggtttgctaaaaattgataaattgattcggttgattctaattggaagaatgccattaagtcatccttaggtgtccggctgagaaaatccatgatgttcgctaggatcccagcttgatcgcctaaatcatcatttaggatcatgaacaaaaaacgaacttcaaatgacgcatccggtgcgatcatattatggaatgtaatcggatggttcaatttaaccggtacaatccgacaggttttaacgaattcactttctgtatgtggaattgcaatattgggataatgactagaaataacggttaaatccaagcctgtcggataattggcttctcgactaatgaggttttcaagaaaatcggccgtgactaattcttgttgataaagtttttgggcaatttccttaaaaacggcatcttgagatgtcgcatcactgataaaggttgtttcttgatgaaataataaagatgttgaaagatcttgctgcattttatcacctccacttgagtaaaaaagtttgataatgtttgtaaatgtttacaggtaaagtgtaaccgcttactaaagagctgtcaaccgtttttatcacaaaattaacttaagtgacgggcacattaagtagtagttttagattaaaacaaaaataaattaatttaaaagaatgcattgcaaacaattgataattgggtaattcaactcggtcgtgttttttattttaggctgcaatcaaactcgcaattaaatggcaccgaggtgcggtaaaggtgggtcactaaaaggattgatggtaatcagaaaaagtgaatggcgcgtattttgacgtggattttagtgaaaaaaccaactgggggacttgacattttggtgtgtagatgataatttatgttcgaaacaaacattttcgaacaaagaggtgatgaaatgctaaaacgtgaacgactggtcgcaattcttagaatggttaatgcttcagggttggtgacaacaaccaaattgatggaaacgctcaatgtttctgacatgacaattcgccgtgatttggatgaattaaaccaaagcgggaaactaattcgcatccatggtggtgcacagagtatcaaaggccccacgttatatgaactttcacatattgaaaagcgagaaattcatatcgatgctaagcaaaaagtggcaaagttgggggcacagttcgttaaggaagaagacacaatcttcattggttcaggaacaaccttggaattgttggcgcaatacattcaagtcaattcgctaagagttgtgacaaatagtttgccagtgtttgaaagtattcaaacgcgcgacaataattgggaattagtcctagtgggtggcaattatcgtagtcgttcaggggcctttattgggaatttagccaatgcaacgttggagacactgaaatacgacaagacgttcattggagttaacggcatccataatgaaacaatcatgaatgcgagtgctgaagaaggcaagacgcaagggattgctttgaataatgcacagcagaaattcattttggcagacgctagcaagctcaatcgggatgatttctatcacttctatagtttgtatgatgttgatgttttaattaccgatcaatcaattacaaacgaggaggtcaagcagtattctcagtttacgaagctagtcaaataaaataaataggagtgaataatatgaaaatcgcaattgcaactgatcaagcaggatttggattaaaggaacatatcaaacaatatctaatagaaaaaaatctagaagtggttgatttaacaccaacgccagctgctgattttgtagactcagcagtttcagtgagtgaagctgttttaaaaggtgaagtagatcgcggcatcatgtttgacgaattcggccttggctcagcaatggcaagcaacaagctacacggcatggtaacagctaacgtaactgaagaaaatacagcacatatgaccactgaacataatggggccaaagcaatcgcaatcggtgctggtttggtcggcaataaacttgcagaagcaatcgttgatgaatacctgagtgttgattacgcgggcggccgtcatcagattcgtttagatatgttggagaaattaatttaatcggaggtcactataatgaaaattgctattggaaatgatcacattgttacagctgaaaaaatgaagatttcagatttcttgaaggcccaaggacatgatgtgattgatgttgggacatatgataatacaagaacgcattacccaatgtttggcttgaaggttgcggatttagtccgtgatcaaaaggctgatttaggggtagtcatttgcggtactggtgttgggatttcaactgccgctgataagaataaagggattcgggctgcattagtagccgatccagtggctgctagatatgctaaagaacatttagatgctaatgtgattagttttggtggcgcagtggttggcgaacatttaggtgaagaaattgtccgcgcattcatcgaagcgtcataccaagggacaccagaagatgacaagttaattgctaaaattgatgccttagaacctgataatccagaacaacacgacaatccacacttctttgatcgtgaaaataaactctgggcagaagggtactatcacgattagaatgtaatcgcttacgctttaattaagaccacaatttatgttgttagatatagcattaaccgatttgatcgcagttaaaaattaactaaatgaaggatgggtaaaaatatgtcaccaaataaattagctttattaaagaaaatgtcaaatgaagatggcgtcattgcagcattagcaattgaccaacgcggttcattgaaaaaaatgttagcgagtgcttctgacacggaagaagtaaccgaccaagatgtgattgaatttaaaaaggcgatttcgtcagaattaacaccatattcttcatcaatcttacttgatccagaatacgggctaccagcaactaaagtgacagctaatggaactgggcttttaattgcttatgaaaaaacgggttatgattcaactgagccaggtagaatgcctgatttaatcagtgaatggtcagcaaaacgcttaaaagaagctggcgcagactctgttaagttccttttatactatgatgtggatgaagatgccagcatcaatgataagaaacaagcctttgttgaacggattggttctgaatgtctggcagaggatttaccattcttctgtgaattagtcacatacgacgctaagaacgacgatgtaaaaggtgcagaattcgctaaagttaaaccacacaaagtgattgaaatgatgaaggaattctctaaagaccgctacaacatcgacgtgctgaaggtcgaagttccggttaatatggcatatgttgaaggcttcaatgaagatcgtcccgctgtttatactaaggcagaagcaacgaagtacttcaaggaacaaagtgatgcaactgcattaccatatatcttcttgagtgctggtgtttcagcagaacttttccaagacacattgaaatttgcgcatgaagccggcgcacaattcaacggtgttttatgtggccgtgcaacttggaaaaacagtgttgcaccatttgctaaggaccatgaagctggccgtcaatggttaagaaccaacggtaaagataatatcgtggctttaaacgaagtcttaaaagtaacagcaacaccgtggtttgataaaatacgttcataattcctaattgaaggtgagtcaatcaatgacaacattagaagcactgcaagcggctaatccgcagtatcaaattctcacggtcgatgatcctagttttcgacaatttggcgtttgttatccgcaatatgatttaacgaccattaaacaagcgatggcatcgattccggttaaagatcagaatgtgtatgtcaccagtaatccgcagttagaagcaatctcaatgatgcaagctattggccgtgatgttttcgcggggatggcaatcgaagcaggggagtgtacggggcatacgagtgacttttcagcaatcgaatatcaccaaggtagtgaagtgaacattacattgactgacgtggtaatggtgcttggcaaacgcgctgatttagaacctaaccaacaatttgatccacaccaggatgcgaaattattctatattcctgctggtcaagtagtggaattctatagcgatacgttgcattacagccccattcaagtcactgctgcggggttcaaagtcattgtcatgttactggctggaagcaatgaaccatttacccaaccactggtaacggataatcacagaatcgtaaaacaaaataaattccaattagtgcacgcatcgcgaacggataagatcgaacaaggcattcaagtcggtgtgaccggcgagctgattaaaattaaatcaatatcgatctaaagggggagcattttgttaacaattgaatctgatgcattattagtcaagattaatgaaaaaggcgcagaattaacacaaatcacgaataagcaaaaccaaattgattatctgtggtctggtgaaagctggcaacgccatgcgccaattttattcccagcaattgggcgttcaaacgataaccattacttaatcagtggtcaatcgtatgaaatgccgcaacacggttttgcacgcgaccgtgtgtggcaagttgtcacacagacaccagccagtgtgacgttacgcctaactagcaatcaacaaacgcaacccttattcccatttaattttgaattgctagtcacctatcaaatcgttgaaaatcgcctagactcccagtatgaagtctgcaatctggattcggctgattttagctttgcgttaggtagtcatccaggttttaacgtgccccttgcgcgtggaacagaatttacggattattatttggattttggcgagcaagttgcacaattagatttgtatgcgattgatcctgcaccatttcgttcaggcaaacgccaagtcttagcgcttgaaaaaggccgttttgaattgcaacatgcccggtttgatcaaggattattattgttcgatcggcccagtcaacaggttagcttgaaaagcgccgtgacggatgcgcaaatcacattaacgacgactgattttccatacatggcgttatggacgttggaaaatcagacggaaaacttcttatgcattgagccatttgcaggaatgcctgatcaatatggccaagttcaagaattgctgacaaaagaagcgaaccaagttttgagtggtggacagtcgcaacaatttaagtatcaactgacttttgaataagcaactgttaagaaggttcccttgctgggggccttttttacattcctattcagtttgggttatactagtaatcagcaactattctgatcaatgaattgaagaggaaccagtcatgagtaaaaaattagtgattaccgaaaaaccgagtgttgccaaagagcttgctaaagttctaggaacaactcagaaaactaaaacctattttgagggcgatcaatacgtcatcacttgggcgtttgggcatttgttatcgctgcaattaccagaggatatcaaaaaagaatggcaacaatggcgtttggaagacttaccgattattccgaaacatatcggcttaaagccattgcctaaaacgggtgggcaattaaaagccatcagtcacctcgccaaccgcaaagatatttcaggtgcggtgattgcaactgattcggggcgtgaaggggaagccgttgcgcgctatattttggaatggattaaattcgataagccggttgaacggctctggatttcatcgcaaacgactaaggccattaaagcagggtttgcaaacttaaaaccagccaagcaattcgacaatttgtacgcatcagcgttagcacgcggcaaagcggattggttgattggcttgaacgtgacacgggcattgacgaccaagtatgaagataatttatccgctggtcgggtgcagacaccaacgttagcctttgtgaacgaaacggcacaacaaattaatcgttttaaaccgcaaacctactacacaattcacttgacggtcgatcaacagcaagccgccttacaattagcaaatccgcaaagtattaagacgcgccaagcggcagacgacttagttgcacaattgcaacaagccaaaggccaagtggtcagcgtcaaaacaacgcagaaatcgcaatcagcacctttaccatatgatttaacggaactccaacaagtggccaacgcaaagtatggtttatccgcgaaaaagacgttatccttgattcaatcattgtatgaaatccataaagttgttagttatccacggacggattcgaaatatctctcaacagatatcgaagggactttgaaggaacggttgtcggcattagtcaaatttgatccacgtgctaagcaatacttggggcaaggcagtcaggtcaaacaaaaagccgtctttaatgatggcaaagtaacggatcactacgctttaattccaactgaagaacccgttcgtgccgaaaaattatcgacggatgaactacgcatgtatcgcttgattgtagaacgctttttagggttatttgctgatccatacgtgacagctgttacgaaagccaccgttaagtttggtgatcaaacctttacgtttaagcaaacaaaagtcgtgcaacaaggttggcatgctgccgataaagaggggcaaccaaccgcgacggtcgactggcgagaagggatggtagttcgcgctaattttgcggttaaagaacaattgacgacgccacctaagccattgactgaagggacgttgctcgggaagatggaacactacggtttggggacgcctgccactcgtgctgaaatcatcgaaaaattagtccgtagtgaactcctagaacgacaaggtcatgctttagcagtgacgccaaaaggccagcaacttttgaaattggttaatcagaccttggtttcaccagaactgacaggaaaatgggaacagtcgcttgaagcgattgccaaaggcgaagaaaatccgaaggcgttcatcactgaaatcgagggtgccactaagaccttggtcggtgagattaaaaagagtgagacggaataccgcgattttgcagtgacgaataaaaaatgtccggaatgtgatcatccgttaaaagaacgcaatacgcgtgacggtaaaatttatatctgcacaaactgtcactatcggcgtcggaaagatccgaaggtttccaaccaccgctgcccacaatgtcacaagaaaatggtgattattgaagggcaaggtggcgcatacttccggtgtcttaatgatgggacgaccgaaaagatgctcgacaagaaagatcgtaagaagaaaatctctaaacatgaagaacgccgcttgattcaaaaagtgaaccaagaagatgaaccagcggaaagtccattagccgctgcattgcgtaaggcaatggaaaaataagctagcaaaagaggtagcaactagaattattctggttgctacctcttttttttgtttagaaaagttgtttgacttgttgtttggtgcggtcaacaatattctgaccgtctttgacttgcatgctagcatctaagtgagaacgaccagtcatgtaatcgaatgcgacgccaggttcaacattccagacgtaatcgttgaaattcagcgtgccatctgttgaaatggcttgaacccagtaaccgcgcggcatcagttcattaccccgaaaaacggtcgtgactttgtaaatcacttttttgtttgcttcgagcgcagtgcggactttttcttcaaaaatctgcatcgttttctgattactgtacgcgctttgggtggcgaggttaagtggattatctaaactgcctggttgaccagcttgaaagttaccattctgatcaaaattaaaagtgagtgtataagcaatcaagtggccacgattttgcggtgtgattcggcggccattgacaatcagaggttgattatgccaacccgttggattccaaatttggcgcgtccggccttctgatttgcccagattccgctttgataagtaagctgtgacgctagttgttcggttaagctggtcgagttgcccatagacgattttttcaccttgccaatccgttgctgttaattggctttgttcgttattaattggtagataggccgcagctccgcttttaaaatcttgatcagcgatggcttgataatcaggactgactgggggtgtttgtttagctggttgctcagtagcaactgtagcagggaacacattttgtaagacattgttgcgaccaccgagataaccgactgccaagatagcaatggttaagatggttcgtctaatttttttcgttttcaaaagagatactcctattaatgaaaattgatttgagacaagataaaaacccacgagatgaattgatcatcggtgggctgaaggtattattttgaactattgcgtagtgtcagcgtcgtgccaatcgtaatgacttgggggataatttcgctagcggcgagttgtttaaccaataactcggcagctgattggcccatttgttcagtgtaaactttaacggaacttaaagtagggaacgtgtattggcaaattgaggtatcgttgaaactaatcaggctgagttgttcagggactttgatgcctgattcatgtaaggcgcgtaaagcgccgactgccattgcatcattggcgatgaagagggcttctggtaaatcggaactttggtcttgtaataattgtatcatgagttggtaacctgattcgggtgtaaagtcaccggttaaaatccaatcggggtgatagtttttttgagctttgagtaacgtcttaaaatgaataaaacggggatccggtcccaatttagtattatcagcagtgctctcttgaccagttaacataccaattttagttaagccagcggttgtaaaatggttgattacggatttaattggtgttttgaagtcggtcatcacacagctgacttcataatcgagcgtgttcatgtcgacgaagacgaggttgtggttgagttttttgaggcgcttaatctgcgcagggctgtacttaccaattaccacagcacccgtagcatcatggagcgtatcaaatggatcgttttgaaagaagcgtgttacgtcataaccaagttctttgagtttcttttcaacgccaagtcggatggagaggtagtatagatcttccaattcttctttagcggtataccattcgacaatcgcaatgcgtccgcgttgctggttcattttgcgcgtgtttttacgatagtttaaactttcggcggcttcgaaaatccgttgccgggtctcatcgccaaccgaaagtgtttgatcataatttaggacccgcgaaacggttgcattcgaaacgttagcgagttgagcaatatctttgatcgttgccaaggtgcacctctcaattcaatgtttactattacttagtttagcataaccaatgaaaagaaagcgatagttaacaaaaaagattgattttttagtaaatgtttagtaaaatgaaagcgattaataaaggaggaatttactatgaacatgacagaattaaatactgcattcgaaaacgcattccacaaagcaccggaagcgagctacttcgcaccaggtcggattaacttgattggtgaacatactgattacaacggcgggcatgttttcccaaccgcgatcacattgggcacatatgcagtcgttgctaaacgtgatgaccaaacaatcaatttattatctgggaactttgaagatgcgggtgtcatttcatttgacctcagcgacttatcttatcaaaaggcccacaactgggcgaactatccaaaagggatgattgtttaccttcaagaacaaggttacacaatcgacagtggtttggatatttatttaaaaggcaatattccaaacggcgctggcttatcatcatccgcatcaattgaattattaatgggtgtgattctagaagaccaattcaatttagaaattgaccgtgtcgaccttgttaaaaccggtgtcatggttgaaaataaatttatcggcgttaactcaggcatcatggatcaatttgccgttggaatgggcaaagccaaccatgccatcttactagacacgaacacattggattacgatttagtcccaattgatttgcaagacaatgtgattattatcatgaacactaataaacgccgtgaattggccgattcaaaatataatgaacgtcgcagtgaatgtgaaaaggccttagccattttacaaacgaagaatgatattcaatcattgggcgatttagataacgaaacctttgatttacaaacatacatgctacaagatgaaaacttgttgaaacgtgcacgccatgcggtttctgaaaaccaacggacaatgaaggcccgcgaagccctgaagaacaacgaccttgaacgtttcggcaaattagttaatgcgtcacacgtgtcattgcaatttgattatgaagtgactgggatcgaattagacacactcgttcaaaccgcttggcaacaaccaggggtcttaggcgctcggatgactggtgcgggctttgggggttgtgcgattgcaattgttgctaaagaccaagtcgacaactttgaaacgaatgttgctaaagtttatacagacaagattgggtatgcgccaagtttctacgtggcagaaattgccgatggcgctaaaaaattaggttaatcagtcaactgaagaggagaatgataagatgacagttttagtattaggtggcgccggctacatcggctcgcacaccgttgatcaattaattcaacgcggcacggatgtcgccgttgtcgacagtctcgtcaccggccatcaagccgccattaatccacaagcgcgcttttattacctcctataatttttattttatcataccatttaatactgcatactagttaaatctctctaaaaatttctatccaaatggtgttacttttggtgttactttctacatgcacaaacaaaaaaagccagaaacgccttcaaataggcatttctagcttatgcaattcaattaccccacactgccttccatttcataactaatcaatcgattcaattccaccgcgtattccattgggagttccttggtgaatggttcgacgaagcccatgatgatcatttcggttgctttggcttccgagatgccacggctcatcagataatagagttgttcttcagaaattttagagactttggcttcatgttccattgaaacgttgccgtttagaattgtgttgtacggaatcgtatcagagctggagcggtcatccataataatcgtatcacattcgacatgggcaaacgaaccgtcactgtcgcgttcaaaacgaacagtcccgcggtaatcaacggccccgccatctttggcaatcgattttgaaacgattgaggatgacgtattcggtgcggcgtgaatcatccgcgcgccactgtcttgatcaacgccttcgccggcgacggcgattgagagcatggttccgcgggcaccttcaccatcgaggtagacacttgggtatttcatggtcatcttcgaaccgagattcccgtcgacccattccattgtcgcattttccatggcttgggcccgtttagtttccaaactataaacgttctttgaccagttttgaatggtcgtatagcggcaatagccatcccgtttcacaaagacttcaacgaccgctgcgtgcaagctatcacttgaatagcttggtgcagtacagccttcaacgtagttcacgctggcgccttcatcgacaataatcaatgtccgttcgaattgacctgaattttcggcgttaatccggaagtacgattggattggaatatccgtccgcacgccttttggaacgtagatgaacgtgccacctgaccaaacggccgagttaagcgctgagaatttattatcagttggtttgaccaacgtactgaagtattccttcacaatttcagggtattcgcgtaaaccggtatccatatcggtaaaaatgatcccaagtttttcgaattcttcacgcatgttgtgataaaccacttctgattcatattgcgcactggaacctgctaaatacttacgttcggcttcaggcacacctaagcgatcaaacgtttctttgattttgtcgggaacatcttcccaatcgcggtattgcttgtccgttgccttttgataatacaacatgtgttctaaatcaagatcggataagtccggtccgaaatctggcattggcattttttcataagcgtgaaatgattttaagcggaaatctaacatccattgtggttcctttttctcacgcgagatggcgcgcacaacgtcttccgttaaaccgcgcccagttgaaaagacgggctctacatcgtcgctaaagccgtagtcgtactcttcaaattggggcatcgttgtctcttctgtcattcgttagtttcctccgtttctgcgtggttcatcatttgaccggttgttgcacgtcggtcatcgctatttaaggctttgtggagcgccttccaagctaaagtcgcgcatttaatccgcgcagggaattgttgcaccccttgtaaaatcgcggcatcttctaacaatgaccagtcttcgtcacgatcaccaatcatcatatccgaaaagcgttcgatcatcgcctccgcttgcgccggtgtcttatgcatcacggcatcggtcatcatgctggcagaagcctggctaatcgtacagccttcccctgaaaaagcaatctgactaatctgcccgtcttcgagcaccagttcaagttgtaacacatcgccacaggtggggttgcgtaattcaatttcatgatcggcagtcgtcaagtgaccatgatgatgcggatgttgcgaatggtcaagaatgacctgccgatataagttatctaatttagagagtgccattttggaaaaactcctttgctgcttgaatggcggtcacgaacgttttcacgtccgcttcggtattgtagaggtaaaaactagcgcgcgcggttgcggcaacgttcaaccattgcatcaacggttgtgcgcagtgatgaccagcacgtacggcaacgccttccatatcgagggcggtcgctaaatcatgtggatgtaaattgtcgagattaaaggcaatcacaccggtgcgttgggcggcatcttgtgggccataaatcgtgaggccgtcgattgcttggagctgcggtaaagccattgtgactagcgcttgttcatgggcttggatatgatccatcccaatttgcgttaaataatcaatggcggcccctaagccaattgcccccgcaatgtttggcgttccaccttcaagacgccacggtaattctttaaacgttgaagattgtaagcccacaaagtcgatcatctcgccgccgtattccacgggtggcatctgttcaagtaatgcttgcttgccataaagcacaccaatgccggttggtccaagcatcttatgccctgaaaaggcgtaaaagtccgcatcaagtgcctgcacatcaaccatcatgtgcggcacggcttgtgcaccatcgaccaccatgtaaccgccttgtgtatggactaaagccgcaattgttttaatcggattgacaaccccaagtacgttggaagcatgcgccaaactaacaattttcgtcttaggcccaatcacctggcgtgctgactctaaatcgatttgcccatccggtaataagtcgatgtaacgcaatttcgcgcccgttttctgcgccagttgttgccacggcacgagattactatgatgttccatcacactaatcacgatttcatcgccggcttcaaccacggttgggccgaaactgcctgcaacccagttcaaactttgcgtcgtcccttttgtgaaaatcacttcggcactcgcagcggcatggatgaaggtttggaccttcgtgcgcgcggcttcatactgggcggttgctcgttcagctaaagtatgcacaccacgatgcacgttcgcattgtcattttggtaataagccaccaaccggtcaatcacggcttgtggtttttgggtggtcgccgcattgtctaaataaacaagtggttcatcattgacgatttggtctaaaatcggaaagtcgcaccgataatcatttaactggttgaccatcgattaacttcctttcaatcgtgtccgttaattgttggcgcacgtttttatccggaatttcacttagaacagcgcctaagaaaccacgaattacaagtcgttgcgcgacttcttttgaaagaccgcgactcattaaataatacatttgttgttcatcaacgcgcccgacactggcagcatggccagcttgcacgtcattttcatcaattaataagagtgggttcgcatccccgcgtgctgtccgcgataacatcaagacgcgattttcttgttgggcatcggcacccttagccccttttaaaatatgcccgatcccgttaaacgttaacgtcgcatcttctaaaatgacgccatgttgcaagatgtgcccaattgaacgcggcccaatattcgtcacacgcgtatcaatcccttgaatctgtttaccagttgagatggcgaccactttcgtttcagcatgtgatccagcacccactaaatcagaatcaaagtcaccgatgatattgccatcattcattgatcccaatgcccaatcaatccgcgcatcgcgcatcaagtggccccggcgattcaagtaagtcgtcacggattttccaaaggcatcaaccgctgaaaaatgaacgtgactgttatctttagcaatcacttccacgacaacatttgctaagttcttgtggtcacccgctgtttggagattttcaagataactaaattcactgttttgttcggctactacgaggacgtgatgaataaaatcagcgggttgagtgctgtcctgtacataataagccgtaatgggttgcttaatcaccacatttttcggcacatacaagaagagcccactgttcatcaaagctgtgtgaaaagccgttaagcgatcctcgttcggtttcactgtgacttgcatgtagtattgttgtaccaaatcaggatgttcttgtaacgcggtgaaaatgtcggtaaaaatgacaccttgttctgccaattctgccggtaaatttaacttggcagttgtctgaccaatctgtactgcgtacggttgatcagctgaaagattcgctgccacagatggcattaaactcaaatcggatttaacggctgttggcgcatttgctgccatcactggccaatgtttatagttaattttttcaaagataggcagttcgagttgctcaatttgcgcaaacgctgcttgacgcatttcagcaaaccaggccggttcttgatgcaattgtgagaatgacgcgatttgttcaggcgtgatggctaatgttttcttcatcagaatcgccccctatttactttcgtcgtcagtcagtttgatatccaagcctaattcgtcacgaatcccgacataaccttcgtcttccaaacgttttgcaagtgacgcatcaccagtcgtgacgattttgccacccatcatgatgtgcacataatctggcacgatgtagtttaagagccgttgataatgtgtgatgattaatgagccaaaatcagccccgcgcatttcgttcacgccttttgaaacgacttgcaaggcatcaatatcaagtccggaatcaatttcgtctaggatggcgaatttgggttcaatcatcatcaattgcagaatttcattccgtttcttttcacccccagaaaatccttcgtttaagtaacgttctgacatttcttccgtcatatccaagaatgccatccgttgatctaattttttcaagaaagccatcactgaaatctgatcatcttcagcccgacgtgcattaatcgccgcacgcatgaattcagcgttcgttaccccttgaatttcagcaggatattgcatcgccaaaaataaccccgcacgggcgcgttcatcaaccggcatttctaaaatattttggccatctagtttgatctgaccttgtagtacctcatacttgggattgcccataatcgtttccgaaagcgtcgacttcccagtcccgttaggtcccatgatcgcgtgaatttcacccgtgttcatttccaggttaacaccttttaaaatttccttaccgtcgatgccgacgtgcaaatcgataatctctaatttagacatagatgaccctccaagaatcgcattctagcaattattatacgctcttaattctatgctaattgagaactgttttcaatgcttgaatgcatgaaaaaagaccacgcggacaacgtgatctttttcaatagattcgcacgggaaataggttaatattactcattgatttgatactcttctaaaaccgttgagccatttggtcagccacaataccggttgaactactcattgatttgatactcttctaaaactgctgtaatgccggcaaagctaaggccaacgttgaactactcattgatttgatactcttctaaaacatgttgaaacgtttaaaaactctgctgtttgttgaactactcattgatttgatactcttctaaaacgttgcctattacgtaagtcaggaatgacccgttgaactactcattgatttgatactcttctaaaacattgccaatcaggctctttcttgtagctacgttgaactactcattgatttgatactcttctaaaacagaatatccagatgatgctgatgtggctgagttgaactactcattgatttgatactcttctaaaactagcatcatattcaaacgcgtaaataataagttgaactactcattgatttgatactcttctaaaacttgcgttcagataactgtttaattgcttctggttgaactactcattgatttgatactcttctaaaacctagaatgtcggcaatagctctaatcgcctgttgaactactcattgatttgatactcttctaaaaccttatcctgataaccacgccttaatcctgtgttgaactactcattgatttgatactcttctaaaacactcaatgacgttagcacaacgtacagattgttgaactactcattgatttgatactcttctaaaaccagcgttcgagattttattggttgtgctctgttgaactactcattgatttgatactcttctaaaactctgaaacaggcggcacagatgatggcgcagttgaactactcattgatttgatactcttctaaaactgaatttagaaccagattgaaatctttggagttgaactactcattgatttgatactcttctaaaaccttttttacgggcgcgtttatttggcaaaagttgaactactcattgatttgatactcttctaaaactgtactaactgaaaaaataatagcgggtaagttgaactactcattgatttgatactcttctaaaacttaaatacctagcctacattgcagtaggcagttgaactactcattgatttgatactcttctaaaaccggcaatccttttaaatccagaattaactggttgaactactcattgatttgatactcttctaaaactacacaagttgcggataccaaagctggtttgttgaactactcattgatttgatactcttctaaaaccgttggcatagatagttaccatatcagccagttgaactactcattgatttgatactcttctaaaacaagtatagtcaactatatagctaccgttaggttgaactactcattgatttgatactcttctaaaactctaagtaattcatcggcatccatcccgatgttgaactactcattgatttgatactcttctaaaacagaacaaaaagccattatgtctgttaaagggttgaactactcattgatttgatactcttctaaaactgcagaaagagggggattcacatgaagactgttgaactactcattgatttgatactcttctaaaactctaagtaattcatcggcatccatcccgatgttgaactactcattgatttgatactcttctaaaacaagaagactgcgttgacgacattagtttgtgttgaactactcattgatttgatactcttctaaaacatacgtttcgcaatccgtaccagttccggggttgaactactcattgatttgatactcttctaaaactgatgaagcatcagcgactaagttttatatgttgaactactcattgatttgatactcttctaaaacaggaatactcatggcgttattttcaggactgttgaactactcattgatttgatactcttctaaaacaagtagcccaaaaatacgaaattagcgttggttgaactactcattgatttgatactcttctaaaaccaactgctagaccggcaaacgtttcctgtcgttgaactactcattgatttgatactcttctaaaactgatttgtatatcgatgatgagtatgtcaagttgaactactcattgatttgatactcttctaaaactaattcaatcgctttaagcgataaaattaagttgaactactcattgatttgatactcttctaaaactacagaagcacaagctgggatgaatgccttgttgaactactcattgatttgatactcttctaaaacaagagtccacaattattgcgctcaacagatgttgaactactcattgatttgatactcttctaaaacagctggcgcatcgattaaggaagtacaagagttgaactactcattgatttgatactcttctaaaactcaaaatgataaatatactgatcaaatccagttgaactactcattgatttgatactcttctaaaactagtgcaactgtaatcaatgcagatttagagttgaactactcattgatttgatactcttctaaaactcgtgcgggatagaaatttggaaatcaggggttgaactactcattgatttgatactcttctaaaacaaaagactagcatcgctttgctttgttttagttgaactactcattgatttgatactcttctaaaactaccttttggaacgattttgaccaggaaatagttgaactactcattgatttgatactcttctaaaaccggtaatactgatggatttaacgctggttagttgaactactcattgatttgatactcttctaaaacatacaccaacatcaatattattaataataagttgaactactcattgatttgatactcttctaaaacagcagttatgtttacttgggcaccattatagttgaactactcattgatttgatactcttctaaaactacttcccgatcatattcaaatgaggtgatgttgaactactcattgatttgatactcttctaaaacagttgccccgtactctgaaacgaacggtaagttgaactactcattgatttgatactcttctaaaacttgctggtcattatccttaactgaatctaagttgaactactcattgatttgatactcttctaaaactatagttgtccgcatctggtttaactgtcggttgaactactcattgatttgatactcttctaaaacattataatacggatgtgttataatatacttgttgaactactcattgatttgatactcttctaaaacagaagcactttcgtctattaatttttcagtgttgaactactcattgatttgatactcttctaaaacttagttgacattgagggcaaaacgaccgaagttgaactactcattgatttgatactcttctaaaacaattgagttagcacttcactaaattccattgttgaactactcattgatttgatactcttctaaaaccgtcgttttttcatcagaatttcattttattcatagcgccattcgacataatcattatcgatgtgataataacaacatttctggtactgatcagatttaacctcttctgaaaattcaatgagaaagagtttcacattcaatgtcgccaccaacctcaccaattcattaaattggttgatactgagatagtgcgaaacgttgatcaacgtgattatttttgattcatttaactctactgctgtctgtactatactctcaattataccatatgggtcatgttggacgacagtcgaaaattgtaaattatagaacttaatcattctttgaagatcccattcctgattgacatctaaggtcaattcatacataaaggccgcatccaaaatcgttgaacgaatctcactatctaactgagttaatttctggcgctgctgatccgttaagtcggcggcgaattttttaatcaaccgattttgaaatagatgattcaaattaattgctgccacatccccaccccaaataacagcctttgaataatccattaattcgtattgatcattgctaaatttaacggtctcttgtgcgccggacattccaataatgagtttggtatacacttctggactgcttgtactgcaaaccgttattttcttattctgaacgctaaaggggtggtatggataaaaagtaatgttcataaaattaacgtcctctcagcagaattacggacgtcatcactcgattcgcccactaagaaatgcattttattatattgttgttcagtaaccatcaacgtttgtactaagcctgcaggcggagtaaagccagcaattcggttctcgataaactgcgccgattgtttgctgacacaaactcgaacataaacagaatattgaatcattaagaaaccttcgttaagcagcgcttttctaaaatgacggtatgccttgcgatcctcgctcgtttcaactggtaaatcaaacatgactaataagcgcattattcggtacctcgtgagtcattaccacctttacttcaaactcttctttcggagttgtcatgaatttcaaacaattctgtacgtgtttagtgagtgcgtttctaagaattgtgatctgtccattatattctagctcaagattcagtaactccactaaaccaaatttaacatcaggggttaattcattaaacttttgatgtgccacccaataatcaatcactggtcgaaaaggttccattagatcggaacccaaattaaaatcactgacgccattgtgatgatgaatgccaaactgtgttaaatagccattacaaacaatttcgcgattaacggctgataacaacaaactataaccataattaagggctgcattaatgggactgtactccgttcgaacaaagtctttatcaaaaactaactgaaaatacttgcgcgcaatcacggcttctcgatttgttcgatcagcaaataccattgcatcagcttctgttgttaagtcttcaatatcctttcctaacaattgtgcacattgaatttgcatcgctattttggcttgaataatcgccgtccataaggtttctttcaaccccgttccccattcaacctgttgttgaatcgacgcgagactacgatttcctggataatccgcaattgtctcgcaagttggattaccgtctttgcctgtaaaaataatcttagcgccagcttcactcaactcagtaattgccgatgccgttaaaacggcctgggtagtcgcaactaacaaaatttggatatcatcaattggtacttggtgtgttgcatcttttgtctggacaacaatcttccgtccagaataagaaacctttgcatgttgtgaaatcacaactgttcgccaactcataaaaatttaccccctacatccttgttttcaaaatgataacatgctataatgctgttgttgagcttgatacactcaatcgaaatactcattgatttgatactctgagttaaaatcaaacaaggtcttcggaccaagttttctattctgagcctcttatgaggcctttttttatgccttcaaaccaaaaagctagcccatcattacactaatgacaggctagctttatttatttataaatcccttaaagctactcgtcgttcgaataaaccggttggagattgatagataatttgggtatcaggtgaaagagaaatccctgatggttgctgcatttgacctagtggcgtacttattttcaacacccctaagtcgataactgccgcatttgcatgtaacccaatcaagattctatctaatatgatctgttgaccaatctgtgtcatcttattaccatcccattgactcttccatggtaacttcataaaggctgctttacccgtagataatttagctctgaattgattagtatcatacagtgggaaatagtgcatcacttgatctaagatttcatcataaacttgttcagcaagttcttcagactgtgttaaaggtagcgcgccatttaataacttaacagccgttttatcaagaatcaattcctgctcattgtgtttatacgtcgcagagcccaatgtcaattcttgaccattatcgaagaaacgttgattgattaggatatgtggtgcaatgacttcgaattcttctacggcctcaatgatattacctttttgtttcttcacttttgtaaattgcggactaattttttgctctaagaatgccttttgtgaatcttcatccgtcagttgtttaagttgcgctaaccaactcgtctcaacaccacagactttatagagatcaccctttttatttttaatgcgtacaatacacatgtaggcaactgtcttacctgagtaaccaccatagagcgcagttgatcgatcttgcttagctggaatcaattgcttcccgccctgaccacttgctttatcatctttagccgcatagagcgtttgattaaatagcgctcccgaattttcatgcactccgcgggtcactagaatcttcttaaactgatatattttattcaaataagctagaccggattctttatcccaaataaccgcttcagtattttcatcaaccaattcgtctttctttagaccatttagaaaattaaagttacgccacttatcttgctgacttgccttctgatactcaccgtatacaaaataaggttttaatttaggatagcgcttcaatagatacagaccaacgaatgcggtcagataagcatcgaatgcatgatgatggttatttagattacgatttttcggaaaatcaaattctgttcgcatttggtgggttaacccactcttaaccgtaattaactcaatattatcttcaccatattgttccatcaatagatttgtcgctaacttaatgacttggcgtgtttctactaattgccggttaataaaacccttcattgcgtatttactgatatgatccggatttaacgttaaattatcatattttttcttggtaattaacccagcacgcaacatttgttcccattgaatctgcatcttttgtccaagttcgacacttgtaaagtcggtcggtacttgatctgctttactacgattcattttttgagaaactaatacccgattatctagtgagttatccttaataaacgactgtggcaaaatatgatcaatatcgtacgtcgataaacgatcaatatttaacgaatcacccgtatacatatcccgaccaccctgcatgaagtacaagaataagcgcgtattgctcaatgcagaattcgataaatccttaagttcatttctgatttcagtattatttagcaattcattgctaatattttgatagacttgttcaacttggcgcttacgttgcaccgaaagtcgtggattcacttcatcttcgcgcgcaaattcaatcaatatccgttctggcgcttggcctttcatggccttttgaatgtcattgacaacaagcagaatctggcggagcgcttttttattctgtggtgacgtatataaatcattgataacatcttgtacatcattttcagctagcatcatttgattagcttcagtaattaatttatcaaagtcttcagagtgcacaatccgcatgaagttatccgttgtatcccagagtaagtccatgattcgttgtccattcgcattgacgatttgcgttaataatttagccgacaaacgaccccaaccgcggtagcgtttagcagctaattgcacacgttgctgatctgttaaccaatcgatttcattcaatttggcgctatatattttgccgtcttcaaaaatcgttgaccattcaacacatttttccaaatcgacttgtttatcaacatcttcaaccgcatccccaacaatcgcctttaagtcatgatacgtgcttaatcgactattgaatttattctcatcagatagaccagtaattgcgggacgacttgcatagcgcttttctgataccaagtaatcctgaatatttttcactgatacacttgttttttgcataaataaatccgtaaatattgcttgtttcaactccgtcgtaatcggttggtcatcaatcttaagtccgtttaattcattcaacacttcaaaccgttgataaattaagctctgtttagggagtacatcttcagccaataaataagtatcagtcgttgtcatgcgcttaatgaattcattagcggatgcttgacggtccactttatcatcgaagttccacggtgtaatccggccttctgatttacgaatcagccacgcaaatttcgcatcggagctttgtcgttgctgctcagccgtaatcaggggccccacatagtatggtactctaaaggccactaattcgtccaatttatatttagcgactgtttgccgtttagaattgggattaagttccgctaaccaggggtaatattgttgttggttctcgataatccggtctaattcctgttgatgtagttgatgcgggattgccccattatctttggtccgttgttttggcataaattgatcaagttcaattaattttttaatttcactcacaatcggatgatctgggttgttctttaaggcttttgtgatatctccataaaaatcttccttcgaataggccttcgtattttcttgaccatcaacatattggtcataagcctgctttaatctctgtcggtcttcaggtgctaacgcttcccgtaccgcttttagcatttttaaatgcttttgatgatcgtcatacttcgtgatcatcgcttgcgacaatgattgattttcaggaacgattcccgccaatagaacaccagaataaagttcctgtaggctttcgataatttgatgggcattatcatcaagactactctctaacttgaccatttcttcatcaaagttttctgcattaaaagtgagtgtccatgctttaacatcttcggcttcgatcccagtaagcacattaaacttcgcttttaaccccaagattgcttttaataattctgtcgcaatcgccttattctgcttttcaactgccttattcgtacttggcgtataaatcagtgataatgcttgtctttgccgattgctagcactttgttgattatccaataagagcgctttgacctccgctaatttatccgtctctagttgaaagccagattcactgaacaagtcagcaaaaatcgtgtttagtctgtcaaaatgagccactaaattaatttcgctactcttaaaggatgagacgggcgcttcatttaaaaagtgcccgcgatacttcacaatatgatgcatcgctaaataaatctcgcgaatatcaaattgacgtttctcggtcattagcttatatcttaaatggtaaatcgttggataatcgtcatagaatgcccgatctgttcgatcattaaataaacttgtctgtggatataactttcgctgatccttcggacttaggtttgattgtttttgccgcaagaaaaaagtatcatcaactggcgtgatatagggttcaaagatttctcttaacaatcctaaccgccatttacgtcgttttaatcggcgacgtgttgttctaaagctgcgccgttctgcggctgtttgtccttcatcgtataaacgaaccccataaccatatttacctcttacactgaccaacttactttggtcatcaaccactgaccacccaattgaactagtaccaatatctaaaccaatattatacggacgactcattcttactccccctaaaagtttatattcaatgatagtatatccaatttaacccgctttttccaattaaattaagaattacacatgctaacagcaaaaaaagacaagtcttaatgacttgtctttgatcattattcaactggtaacactgcgccgtgccatttattcttaatccattcttgcgttgattttgatttgagcgctttaacgagcttcttgatagctgggttattgcggtcttttttatttgtcacaacaatgttggcaaatggcgaagattgcttttcaagagccacagcatccttttcagggttgagaccggcttgcacagcatagttcgagttaatcgccactaaggtgccttcatcattcttcaaaagttcaggcatgagttttggttcgaatgtgtactcaaacttgaggtgtttgggattgctagcgatgtctttaaacgttgcgttttcagcatttacgcccgatttcaaggtgattaagccaccgtcttttaaaattgttaaaacacggccccagtctggctggctgcttgaaactaatactttcgcacctgatttcacatcactcaattttttaacttgtttactgtataagccgagcggttctaagtgaatactgccaacactgactaagtcgtagccgttatctttattggccttcttcaaaaagggtttgtgttggtagtagttcgcatctaattcgccactcgctaaagctttattgggtaaaacataatcgctaaagacttttactttgaggttgatgccttcttttttcaactccggttgaacgtgtttcaaaatcgcggcgtgtggaattgcggatgccccaacgacgattgtgttgctgtctgacttcgcttctttgttaccacaagcggcaagtgcgcccgctaataagaagactgctgctaataatcctaaactgtgttttttcatgaaaactcctccttttaaattaacgatgatcaatgtgttgaacaaccaagtcgcccgttttttgacaaatgaagacgatgattaaaataatgacggttgcgactaacgtaatcgcattttggttagcttggaacccatcttggtaagcaagatttcccagcccaccggcaccaatcacccccgccattgcggtataaccaacaagtgaaattgcggtgacagttaagccggaaacaagcgccggcatgctttctggtaaaaggacttgccagacgatttggacttttgaagcgcccattgaacgggtggcttcaagcacaccgccatcgacttcccgaaaagctaattcaacgagtcgtgcataaaagggcgcggctgagatgattaacgctggaatcgcagctttcgggccaatcatcgtgcccatcaagccttttgtcaatggaatcaacaagacgattaaaatgatgaatggaatggaacgaaagacgttcactaataaagccacaatgccattcaacagccgattcactcgaccaccactcgcgtttgtttgataaagaactaacccgagtgcgaatccaagaactgccaccaataaaacactgacaattgttaaccaaactgtttcaaaagttgcttgccacatacttggccagttcacttgcttaaattgaaaataggattgaaatccgtttacgttatccatgacgtaccacctcaacttcgattgtttgttgtgctaattctgcaaggactgcctttaaatcacttggattagcttgaatttgaatgtataaatagccaagtgcgccattaatggtttgttgtaaactcccactgatgacactgatttcgactgctgggtattgacgcatcaagcgaccgatcaccggttgactcgattgttcttcgttaaatcgcagttggacgattgtaccatttggaacccgttctaacagttgatcaatcgaagcggccgtttcactcggtgataccactaaggattcagcaacaaatgccttggttgcagccatttgtggtttttcaaagatttcgtgcacagtcccttcttcgattaaccgcccattttccatgaccgcaattcgttggcaaatccgccgcaccgcatccatttcatgggtgacaagaacgattgtaatccccatttcacgattaatcttagccagtaacgttaagattgaattcgttgttttcggatcaagggcgctagtcgcttcatcacataacagaatcttcgggtcactaatcaaggctcgtgcaattgcgacccgttgtttctgaccgcccgatagttcgcttggataggccgcttctaaatgggtcaattcaacaatctttaataatgcgcgggctttgatttgtcgttctgccttaggtaccccggctaattttagtggcaacatgatgttttctaacaccgtctttgaccagagtaagttaaagtgttggaaaatcatgccaattttctgccgaatcggccgcattgcttgttcgctcaaccccacaattgactggccctcaacgagcacatccccagtcgttggcttttcaagtccattcaagagtcggatcaacgtactcttaccagcgccggaataaccgataatcccgtagatttcgcccgcttcaatgttcaacgagacatccgttagtgcggcgaatgttttttgttctcgctcaaaggttttacccacttgttttaatgtcaacatactaatcgctccctcttcttttaaaaaatgccaaaaaaaaatccttcctctcaaataaatgagagaaaggacgctaaatgcgtgttaccaccttaatttacgattacctcacagtaatcgccttacaaagtacccgattgatactcgttcgctatatcgggcaacccccgcattcggctcagttaaaccttaccaaatgaattgctcaaagaccatattcatctagctttcacattatccgcttgcacctgaccggactctcttaaaatgctactgactaaattactcatcttttcatcgcttgtattaagtagtacctatcataattaaagttcaattaaaagtcaagcaagactattcaaaaaaatcagattattgtttaagtaatggcctaatcgacccgaatgtcagcaatccacgcatctttttcgttatctgcatttaataattccggattatcagctaacggtgtgttgacgtttactaattcaccagctagtggactgtcaagatcttgtaccatcttctcagcttcaatggccactaaggtttcattagccgtcaatttttgccccacgattggaacatcaacaaacttgattaacccaaactcattttgtgcggctttggtgatcccaattcttctaatcgatgctgcaatttcctctgtccaaaaataatcattattattcatcgtcatccgtcattcactcctagaaagtatcttcagcttcactgaacatgtaactcttataatggtaccgcatcgacatgataaacccaacgccaattaggttccccaataatgacgagcccccttgtgagatgaacggcaatggaatccctgtcaatggtaataaaccaacgctcatcccaatgttttcgaaaacatggaataagatcatcatgatgaccccagttgagacatacgcgtaaaattcattcttcgtatcaaatgtgacccgaatcatttggtaaatcaacaagaagtacaaaagaatcacaaaacatgaaccgacaaagccgaagttctcaccaatgacagagaaaatcatatcggattcacgtactggcacatggacttgcacttgattgaagcctttcccaaatagctgaccagacccaatcgcttttaaactctgcgataattgtaaactggtactggcagtattatcaaaaggatgcagccaagcatcaattcgattgaattggtacgttttaaagcccagatgcgtcaagattacccggccaggggtcgtcgccgctagtgtaagggccgtgcccccaacagcgactaagacagcaatggctggggctaaaatcttccaggtcacacctgagacaagcacaatcccacctaagatggcaacgaacactaataaggtcccaaagtcattttgtaatttcaataggaccatcactggaagtgtccatagtaacattcgtccaagtaacatccaatccgtcttaatcgtgtgttctggataagccgtattgtgttgagtaacgaccctgcccaacatcaaaatatatgccggtttcatgacttcagatggttgaaatgagattggtccaagagagaaccaactctttgccccagtttgcaaggcgactgcccgattataaaagattaaaacggcaatcaagaggaaaatccctaacccataagccagtggtgcaatccgccatagttgttctgaatcaaactgcataattgcgacaatcgcaattccaccaatcacgtaccatgcagcttgcataataacggctcgagttgaactcgcacctgatgtatcatgtgatgttgccacatagattgacatcaagccaatcaacgctagcataaagactgaaaagacgattccataatcaactcgcgaggaatcttctgttgtttctacttcctttggcatgctaagtctccttcaatcaattctgctctcattatataaataacccggccagaattctgccgggttactgtaattctaattaattcttaagaattaaccttggtgtaagtggtactcccgtagtaattcgttaactgcatcgtcgtgggtcttagtaatgatactttgaccagtcccttcaacagttgcttcaaaacgtttcttagcgctatcttctacaatcacgccaatttcatttttgccgaccatgacgcttgtcatttcttggccattacgtttgatgtcatcaattgtgacagtaattttttgttctttttttgacatagttatgttgaacccctaacttctttgacttacttttgtgactcgtcttgctgtcgattacgcaaaacggtgaaatgatctggtactggatcatagccgccccgtacaaacgggtgacaacgcaatatacgaccgatgcccatgattaaacccaaaatagcaccatgtttttggattgcttgaatcatgtaactcgaacatgttgggtaatatcggcaactcggtggtaataatggtgaaattcccttctgatagaaacggaccaatccaatcaatattttccgcaatttatctgcctcactttagcgcatgctactgcaagaaattaataatatgactccatgtactaggcaagaaaacggcaaatggattctggccgccaattgcaaaaccaatcatctgaccaactaataacgcaataattatgagcacgaaaaccaataaaattttctttaaaacgggtttgacgtgttcgtcaaaatttgattgatacacacaatcacaatccttctttaatagaatgcggcttaataagcgcgtttatgttcaatattatctaataagatgccagtccctaaagcaacagcatccaatggattttctgctaagaccaccggaaccttcaaatgttctgagaataagctagcgatattgcgtaataaagcaccgccacccgttaacatgattccccgatcaataatatctgcagataattctggtggtgtcacttctaacacttctttggcagccgcaataatttccatcattgtttcatgcaaggctgattcaacttcatctgcactaattgagacagattgtggcaacccacttaccatgtcccggccacgaatctcaagtgactcactcgcatcagcatgccaaacgttaccaattgttaacttaattgtttcagccgtatgttcgccgattaatagattatgtttcttcttaacgtatgcggcaatttcactattcatcttatcgcctgcaagacgcaatgaacgacttgtgaccacttcacccattgaaagcacagcgacgtcactggtcccaccaccgatatcaataaccatgttaccgcgtggttgaaaaatatccatgccagcacctacagccgcgacttttggttctaattccaagaagactttgccgccacctgatttttcagcagcttcaacaattgctttttgttcaattgatgtaatatttgttgggcagcaaatcaaaatattaggttttgataggaagccctttacatttaatttattaataaaatacgctaacatttcttctgtaatgtcgaaatcagcgatgaccccatcctttaatggacggacagcgtggatattgccaggtgtccggccaaccatccgatacgcttctgagccaactgctaaaacttttttggtttgggtatcaatcgcaacaactgaaggttcgtttaagacaatgccttttcccttaacgttaattaagacgttggcagttcccaagtcaatcccgatatctttagccatttggtgttgctccttccgagaactatattcagtaaatcattataccataagacaggtacctttagtatcctgatttggcaaaataaaaaagcgacgtccgctgaaatagcaggcgccgccagtctgttttatgcacgttttgcttgtttaatccggtgaccggcagcatcaaaatcagctcgactaatatgtgccccaagtgcccgtaatttttgatggaaatgatagtaaccccggtccatgtattgaaggttcgtaaccaacgtttcaccattagctactaacccagcaatgacaagtgctgcggcagctcttaaatcggttgcagccacttcagccccattgaaatgtgtatcgccataaagcacaactgattgaccttcaatttgataatccgcattcattcggcggagttcttccaaatgcatgaaacgattttcaaataccgtttcggtcataacactcgtcttcttagcaagtaattgaagtgtcgtcatttgtgcttgcatatcagttggaaagcctggataaggtagcgtcttgatattacatgcctttaattcagcgggaccaataattcgaacaccagcttcttcgtcaatcacttccgcacccatttccactaattttgataggagtggtttattgtgttcagcaatcgcttctttaatcaagacatttccttgtgttgccgcagcggctaccatgaaggttccggcttcaatccgatcttgcacgatactgtgatccgtcccgtgtaaagcggttacgccttccacccgaattgtctcagttccggcgccaaaaacgttcgcacccatcttgtttaagacattagcaagatccacaatttcaggttcacgagcaacgttttcaatcaccgttgtcccttcagccattgtcgcagccatcacgatgttttgtgtcgcaccaacactaggaaaatctaagtaaatattagttcccactaggcgttctgctttagcttcaatgtaaccatgattttgatgaatggttgcaccaagtgcttcaaaacccttcaaatgtaaatcaacaggccgcgaaccgatagcacaaccacctggcatcgcaactcgtgcgtgacctaagcgcgctaataacggccccatcacaacgatggaagcacgcatttttgaaacatattcaaaagctgcttcaaaattcaaatcaccactggcatcgattgttaattggttccgttgttcatcaaactcaactttagcatctaaactctttaatacatcttgcatcatgaagacatcagataaaataggaacgttcgttaattgaacgggtccgtcggttgctagtaaggcagccgccataattggtaatactgcgtttttggcgccttcgatttgaacttcgccaactaatcgttgaccgccttgtataatcaatttttccaagagtttccctccgaataagactgctagtttatgggactaaaaaaatcacatttttagcctgcgcgattatttctaaaaagaattggctaacggtgtagcccatcacaatagcgagaaatactatgacaatctgtacttgacggatatgattcggtttgaaaaattgctcaaaccggattgattgtaagccataaaaactgattaaaataaaaccaatatggctaataattgaaataactgcctgtaacccgattgattgcacttaaataacgccccttttgtgatatgcaaacattgtaacataccgaaataggatttgtctgcccaccagactgaatcttaagaaacaaaaaaagccttaaaccattcaggtttaaggctttttgaatcctacaataagtgattcttaacgttaatccggtttatcgcacgttgcagtgcaatttgagcccggcgtaattcgtcagtatcattatgttcggacgctgttttaattgcgttttgagcacgttccttggcactttgcgcacgcctaatatcaatatcacgcgcccgttcagcactatcggcaacgattgaagcaacgttatggctcacttccatgaacccaccattgaccgcaattgcgtcttcacgtgctggatcatcagtccgtttaacgcgaatctcaccaatttctaaaggggtaataattggctcatgattagccataataccaagttgcccggccatcgctggtacaaccaacaatgttgcgtggtgatcatagacaatcccacttggggtcacgatattaacggttaataccttttgttcttctgccatcattaacgcccctttctaagcttgtttcgtttcttgttcggatggtgtataacccaattctttagcttttgctaatgcagcatcaatattcccgacaagccggaatgcttcttcagggacatcatcatagtcacccgctaagatgcctttgaagcctgccactgtatcttttactggcacgtatgagccggcttggcctgtgaaggcttcggcaacgtggaagttttgtgataagaagaattgaatccgacgagcacgcgcaacgataatcttttcatcatcagataattcatccatccctaagatcgagatgatatcttgtaattcacgataccgttgtaagacgtgttgcacttctgaagcaacttcgtaatgttcttcgccaacaatttctggatccaaagcactagaagttgattctagtgggttaacagcaggataaatcccctgttgtgttaatttacgatccaagttagttgtagcatccaaatgcgcgaaagttgttgcaggcgcaggatcagtataatcatcagcaggcacataaatggcttggattgatgtaactgaaccttttttagtagacgtgattcgttcttgcaattggcccatttctgttgccaatgttggttggtaaccaacggcagaaggcatccgtcctaataaggcagaaacttctgaaccagcttgagtgaatcggaaaatgttatcgatgaacaataacacatcttggccttcaacatcacgaaagtattcagcaattgttaaaccagtcaaggcaactcgcatacgagcgccaggtgattcattcatttgaccgaaaaccatcgctgtcttttccaaaacgcctgattctttcatttcaaagtataagtcattaccttcacgtgttcgttcaccaacaccagtaaagacagaaataccaccatgttcttcagcgatattatggattaattcttggattaaaacggttttaccaacaccggcaccaccaaacaaaccaattttcccacctcgtaaataaggggcaagtaaatcgataaccttaatccctgtttcaagaatttctgaacttgtatttaattcctcaaatttaggtgcagaacggtggatactgtcccgtctaaaatctgcaggaaattcttcgccgccatcgattgtttcaccaagaacgttaaatacccgtcctaaagtttctttaccaactggtacgttaattgcacgaccagtgtcttcaacagccatcccccgacgtaaaccgtcagttgattccattgaaatagtacgcattaccccatcacctaattcaagtgccacttctaagacgacagattcgtcgttccctttgttgacaaccaaggcattattgatatctggtaaagtcgtatctaaagaaaattcgacatcgacaacgggaccaataacttggacaacttttcccatactcatagttgttattttcctcccgcgtttcttattctaatgctgccgcaccaccgacaatttcggtgatttctgtagtaatctgtgcttgacgtgcccggttaaatttaattgataaatcagaaattaaattattagcattatcagtggcactcttcatcgccgtcatggaagcagaatgttcagctgttttagaatcaagtagtgcgccgtaaatcaaactttcagcgtattgcggtagaatggcatctaaggcatcatcaacagaaggttctgtgatgtattcttgatctttatcagtgacttctgaaacatccaagtcggtaataggtagcattttttcagctcgaaaagcagatgtcagtgagttgacatggtggttgtaacaaacgtacaactcgtcaaacacgccgctatcatacattgcaacagctgttttgatgatttcacggacttcattaaatgatggcacatcacttacaccacgatattcgtaggataagttcatttgccgtgctttaaagaaatcagcaccagtgccaccaacggctaaaatagcatattcatcggcagacttgtggttttctgaaatcatttcaaccattgcttttaagattgagctgttataagcgccaaccaatccacgatcactcgtgatgaccaaataaccggtctttttgattggtctttccactaacaaattacttaacgtaatgtcatgccgcaatgatttctgtgaagtaccgttagtagcttctgctgctttagcggtacttttttgacgtgcacttgcaattaattgacttgcagccaaatgcgtgacgatttctcgaatcttattcgtatattgttgataagcgattgaatttttttcaatctgagaaagttttgcaccagagaccatttgcatagcactcgtaatttgcccagtttttttagtagaggcgattcttcgtttgatatccattaaagattcagccaattaattcaccccttactgtcctgagtcttgattgtcagcagtagcttcagcgccgacaaaaccttctgtgaaggatttgatagcagcatctaacttatctgtatctggcaatgcagcggtttgacggatagtgtccatcaagtcctttgcgttactttcaagataatcgctcaattgactttcatattgcatgatatcgtcaactggaacgtcatcaataaagccgtgtgttaatgcataaagaatcgttgtttgttgttcgaatggtaatggtttgtgaagtggttgtttcaaaacttcaacagtccgtttaccacgatttaatttcgcttgtgttgccgcatccaagtctgaaccgaattgcgtaaaggcttcaagttcacggtatgatgaaagatcaagacgtaatgtcccagaaaccttcttcatcgccttcgtttgcgctgcgcccccaacacgagaaacagatgacccagcatcaatcgctggacgtgttcctgaatagaataaatcactttccaagaagatctgaccatcagtgatggaaataacgttagttgggatataagctgagatgtccccagcttgtgtttcgatgattggtaaagcagtcattgaaccgccacctaattcatcacttaacttagcagcccgttccaataaacgtgaatgtaagtagaagatatcaccagggtaagcttcacggcctggaggtcttctcaaaagtaatgaaatttcacgataagcagcagcttgtttacttaaatcatcatagacgattaagacgtgcttgccgttatacatgaattcctcacccatcgctgcaccagcatatggtgcaatgtagagtaatggtgctggttgactaggaccagcttcgacaacgatggtataatccatagcgccgtaacgacgtaaggtttccacttgcgctctaacggtcgattctttttgaccgatcgcaacgtaaatacaaatcatgtcttgatctttttgattaataatcgtatcaatcgccacagatgttttaccagtcttacgatccccgataattaattcacgttgaccacgaccaattgggaccaaagcatcaatggctttcaaacctgtttgtaaaggttctgaaacagattgacgtgccataacgccaggggccttcttttcgattggacgagttttgtccgttttaatttcgcctttgccgtccacgggttgacccaatggattaacaacacgaccaattaaagcatcgccaacaggcacttccataatccggcctgttcgtttaacttggtcaccttcacgaatgttttcatattcacctaagatgataatcccaacatcgttggtttccaagttttgcgcaaccccgtatgaaccgttagaaaattctagcaattcacttgaaagggcgttttctaaaccgtgagcacgtgcaatcccatcaccaacataagtgacagtaccgacttcttcaacggctaaatcttcattataatttgcaagttgttgtttaattaatgcactgatttcctcagttttgatgctcatcaggttcacctctttatcaacgattgactatttcaatagtaatgacttaatttgatctaagccatgtttaacactgccatcgatcaccttgtgattcgattccagtacaatcccaccaataatatctggatcaacgatactttccactaagacctgattgagaccttcgcgtttagcgtagctttggctaatctttacgatttgatcaccatctaaagcaacggctgacgttaccttagcgtgtgcaatccccatcttttgatcataaagatcttcgtaggccgcaataatgtatggcatctcagccattctttgatagtcaaaaacaaggcttaaaaagtgttgcatgagtgtactaaattcaccggaaaggctctttagaagctcacgttgtttcaatccagataaagtcgtatcagtcagaactgcacccaatcttgggttgtcattgaaaatagtctcgagtgcttgtatctcttcatggatactttcaaattgttgctcttgttctgcaagggaaaataatgcctttgcatagcgttgtccgactgcatatttatctagtttcattttgcttgtccaacccttcaatataggaattgatcaatgacttttgatcagtaactgacaattctttcttaatgagtttagaagcaatttcaatagatagttgagcaacatcatctctcacactgtttaacgcatctaaacgagattgttcgatgtcttttttagcattttgttttaaagtttggacttcttcttgagcaagtgtgaccatgccttcgcgttgtttttcaccatttcgcttggctgtattcacaatttcaactgcttctgacttagaattcttcaactctgttgcgcgttgtgctgctaatttggcagcatcttcacgtgattgagcggcgttatctaagtcgtttgtaattttgtcagaacgagcttgcatcatttttgaaacaggtccgaacgcaaatttaccaactaaagcgactaaaatgataaagacaactaatacgaaaagtgaatctccaaggtaggcttcagaagcaccaacgattaaattactaaacatctattgacactccttccttgacttactgactaatttttaaagcgaaaatttagattcactcggattaactaaataagatcaagaaagaaacgacgatagaaagaattggaacagcttcaatcaacccaacaccgataaacattgttgagcgtaattctgctgataattctggttggcgtgccatactttcgattgtttttgagataaccttaccgttaccatatgatgctgcgaatgctgctaaaccagctgcgatagctgctgctaaatagttcatgttttttcctcctaatttttagtcttccatttcaactttttctgaaatatagactatcgataatgttacaaatacatatgcttggattgccccgataaagacggagaatccttgccaaaccatttggatcggtgccgtcacaagcatcgttgctggtccatgtgagaaggccattttaactaataaacttagtaaaacttcacctgcaaaaatgttcccgtacaaacgcaaggacaacgttaagaaattggtaaattgttcgatgatattaattggtaagaaaaatcctaccggtttaatataactcttcatgtaattaccaaaccctaaccgttcaacactaaagtagtgcgcaatcactaagacgatcattgcaagcgacatagtgataatcggattggccgttggactcttcaaccaagttacatcatgtaccttaatttgaagaatcaaaccaagttgattactgataaatacgaacatgaacatgacgaatgcaaataagtaaaattgtttaccttcttcaccgggcatcgcacttttaacgattccgttcgtaaaatcaatgatccactccaaaatattctgccgtttagtcggtttaagcgcaatttttcttgataaaaagaaaacgagtgcaaaaaccaaaactgcacttactaagaccgatagacagtttgctaaattaaaacgaattcccaaaatgctaataatgggatatttatcatccacaaaattccctcctcccttaggcttatttgttgattccactctatcaacgactacgcgagttgcacaacgaacctaaaaacagcaatatttatgtagaaaaattaagcataaatcatcaccgcaatacaagtatgataataccaccattaaattaaaagtacaaagcaaatactaactaatttctaattatttttttgtcaatgcactcaaataccataaatattatcatatcaaaagattaaacttattaacggttgcttttttggcaaaaaaaacgcgtaacacaggaaaatcaagtgttgcgcgcttttattatcggtacctaattaatggctatttagtcccgaaaagacggtcgcccgcatcccctaaaccaggaacaatgtatccatcctcgtttaaatgatcatcaagaccagctgcatagatgtcaacatctggatgggcttcttgaacagctttaacgccttcaggtgcagccactagtacaacaaggcgcattgacgttgcgccgcgttttttaagggcatcgatggccatgattgctgagccaccagttgcaagcattggatcaacgatgaatagttgtcgttgatcgatatctgttggtaatttaacaaagtattcgtggggttgtaatgttttttcgtcacggtacataccaatgtgaccaactttagcggctgggattaattctaaaacgccatcaaccatcccaagacctgcacgcagaattggcacaacggctaattttttcccgctcaattgtttttcaattgcaggccccattggtgtttcaactgctacgtcttccattgctaaatcgcgcgtgatttcataaaccattaattctgcgatttcgtttgcgacttcgcggaaaactttagtacccgtatccttattccggataatcgttaatttgtgttgaattaacggatgatttaatactgtgaattttgccatttactttgcccctattctattcaatgaatttagtccaaatttttttcgcaaaaaaagagtgactccaaagaaaaccttctccgagtcactctcccttccgcgtaaaattctgtttactattgtagcgtaaatagcatcaaaaaactagcggtattcattaattaatctaaaaatttagcttgtgtgattggaaaacgatccgtcaacgctaaaacatctgcactaatgcgcgtcatggcgtctaattgatcgtgtttttcaatcacttctaaaattaattgcgcaatcaattcacaatccgcttctttaaacccgcgcgatgtgattgctggggtcccaattcgaatcccacttgccttaaatggacttaatttttcaaaaggaatggtattcttattaacggtaatgtggacactatctaaaaatgcttggacttccttcccatttaagccactctgcgttaaatcgagtaacattaaatgattgtcagtcccgcctgaaaccacacgtactaagtcagattgttcaaaaacggcagccatcgcttgcgcattggccacaatttgttttgtatatgctgtaaattcaggttgtaaatcttcaccaaatgcaacagctttcgccgcaatgacatgttcgagcggtccaccttgaataccagggaagatggcagagtcaattgctttggcatattctgctttacacaaaatcattccaccacgaggtccacgcaacgttttatgcgttgttgtggtcaccacatcggcatatggtactggacttggatgaacaccagttgccactaaaccagcaatgtgtgccatatcgaccattaaataggcaccgacatgatcggcaatggcgcgtaaccttgggaagtcaattgtccgactgtatgctgatgcccctgcaacaatcattttaggatgaatttcatccgctttagcagcgagcgcatcataatcgattcgttcgttatcgtcagcaacgccataactatagaagtgataaagttgcccactgaagttaaacggtgacccatgggtcaaatgaccgccatctgtgaggttcatccctaaaatcttatcaccgggttctaaaagcgcttggtaaactgccatattagcctgcgaaccggagtgcggttgtacattggcatgttctgcattaaaaagttgtttagcacgttcaatcgcgagtgattcaatttgatcgataaattcacaaccaccgtaaaaccgtttgcccggataaccctcggcatatttattggttaatacgctaccttgtgcttcttgaacagctccggaaacaatgttttcagaagcaattagttcaatattatgcacctggcgttgttcctcttttttaatcaattcgtaaattgctggatcagtttgttcaatcatttacaatcactcctcttcctattaaaatagtgcctatttcgaagtaaagtattgttggccggcagacttctcgaggcgattcatatacgctaatccgacaccctcttttgcgaagccttgcactaatataattttaacctcaggattcaaatcaaaataccgtaatccttcaaacaagtgttgactagcagtcactacagaatcacctaaagagaactgatctttaaacctaacgtcagataactgccctaacaccgtatcaaccgccataacaccaaatggcacattttgttgactggcccatttaaccgccgccggaaattcatctggcgttggcactatgtaaacctgtgcatttggagcatagtgtttgtatttcatgcctggtgcctttggcgtttcagctgcgccaactttatggtggtttgtcataatcggcccaatcacacgttcaatggcttcttgagtcacaacaccgggtcgtaaaataacgggtgtcgcaacacttaaatcaatcaccgttgattccaacccaacaccagttggaccatcatcaatgacaccggcaatctttccatttagatcatgtaaaacgtgatcggcagtggttggactgggcttgcctgatgtattggctgaaggccccacaagtgggacaccggccgctttaatcaagtctaacgtcaccgcattgttcggcattctaaaggcagcggtctttaaaccacccgtcacaactgaatctagtgccgcatgttttagcggcaaaataattgtcaatgaaccgggccaaaaagcgtcgactaattgcttaaatcgatcactaactccggctgcgtaatgctcaaccgtcgcaacacttgctacatgcacgattagcggattatcacttgggcgccccttagcggcataaactttcttaaccgcttcaggattcgtcgcatctgccccaagaccatagacggtctcagttggaaatgaaatcaattcgcccgcttttaaatctgctgctgcttgttcaatctgttctactgtgtatctcttggtttccattataggccttccttactctacttctgatttacatcataccaaattccgattgaaatcgtaacccacacgggccattctagaccaattagccatatcttttttgattgtaaccgctacatcggtcgattcatgttcgaacaaccgaacgatcgcctctttttgctgataaccgaactctaaataaagctgcccatctggttttaaatacgcacgcacttctttagcaaaccgttcataaaacgctaagccgttattatctgcaaatagggccaagtcgggttcgtatttcaaaacggacgcatccatcacatgccgttcatcttgtgcaatatatggcggattagacacaatcacatcaaactgttggcccatcactggggttagaaaatcacccacgataaagttaacatgcgcgtttaattggcgcgcatttgcttgtgcaacagcaatcgcttctagtgaaatatcaattgcggtcacttcccattctggatgctcacaggcaagggtaattgcaatggcgcccgttcctgtcccaacatccaacactttaagtggtcggttctttggttgtgtagcatctaatatccattctaccaattcttccgtctcaagtcgtggaataagcgttgccggcgtcaccttaaaatcgcgtccgtaaaaattagcatatcccaaaatgtattgtgccggttgatcagcgataaacgcgtttaagtctgcttgatactgatcgtattcggcagtcggcatttcatcgtgataatgcaagaccagttgggtcgtcgtccaatgtttacgaccgagtagtaaaaagcgcgctgcttcacgttctttagcgtgttcttctaaaaataaaaaagcccaattcagggctttaagataagtgagctgtgccatcttgtaattgctccaatttttcggtttgatcgtaaagaattaacgcatcaatgacgtcgcctaattccccgttcataatccgatctaatttgtttaacgttaaaccaattcgatgatccgtcactcggttttgtggatagttatatgttctaatccgttcagaacgatccccagacccaaccgctgacttccggcttgaatcgtattcactttgattttgtgattcatagaaatcataaacccgtgactgtaagatttgcattgccttcactcggttttgttgttgtgaccgttgatcttgcatcgcaaccacaatcccggttggaatatgcgtcatccgcacggctgaagaggttttattgatatgttgaccaccagcacctgaggcacgataaacgtcagtccgaatatccttaggatcgagctgcacgtcaaccccatcatattcaggcataactgcaacagtcgctgttgaggtatgaacacgaccttgtgattcggtctttgggatccgttggacacggtgcgcaccattttcatattttaacttcgaataaacatttttaccggtaatcatcatcgcaacttctttgaagccacccacttctgtagccgtttcatcgatgatttcagtttgccagttttgtgattcagcgtagcgttgatacatattcaacaaatcacctgcaaagagactggcttcgtcgccaccagcagccccacgaatttccatgatgatattcttttcatcgttaggatccgttggtaacatcaaaatcttgatgtcttgttctaattgttccttttcatcttgtaactcacttaaatccgctttagctaattcttccatttctgggtcattagattcgcgtaacaattcttcgctttctgcaatgtcgtttaagacagtcttcaaacgcgtgtatttaccaacaatttcccgtaaacccgcttcttctttagacaattccatataccgactggtttcgttgatcacttctggatcagacattaattcctgtaattccgcatagcggtctaacaaactatcaagttgttcaaacattttatccatgaatgactagccttccttttcactctcttgtgttaccggtgggttaaaatagtgtttccgacaaacggggtagtatgcttcgttgcccccgatttgaatctgttcacccgtataaaccggtttgccatcgttcattcgcaagttcataatcgcttttttgcgacagaaccaacagatggtcttcatttcttcaatcttattggcaaatagcaataagtatttcgagccttcgaataattcattcttaaaatcattcttcaacccaaacgccatcaccgggatattcaaatcatcaacgacctgcgccgcttcgattacgtgatgccgttctaaaaattgtgattcatcaatcaagacacacgctgcatccggattagtcgattgtaccaactcaaagatattcgtatccgagaaaatcggtgtcgcctcacgtttgagcccaatccgacttgaaacaatccccaccccgtcgcgattatcaatcccactcgtcaggatgatcactgatttattctgctcttcataattgtgtgcgacttttaaaatttcaatcgacttaccactattcattgcaccatatctaaaaaataattgcgccactctcaaacacccctatgttaagcacattttaatctagtatacctgaaaatcagcgaggcaacaatattcgccactattaaattctaaagtttcccttattttatttgcagatgcgtttttatatcgtccaaattgagaatttatgctatgattatgaacattgaaagggtggcaagcatgacaattaaaagctcatttgcaattacagcaggacgtttttcatattggtatttacatacctttatgaaaggtggcagctccctccccgggaaaatcgcaaccaagttcgatcctgctgtgttaaagcagttaaccaagaactacgacgtgattatcattaccggtaccaatggtaaaacattaacgaccgcactcactgtgcagacgttgaagcaaaaatacgatcatatcatgaccaattcgagtggctcgaacatgatgcaagggttgaccaccgcctttttagcagatcatcctcaaaaaggacaacggcaattggccgtcctcgaagtcgatgaagccaatgtggaacccctttgtcactacatcaagcccaaagcgattgtgatgacgaatattttccgtgatcagatggatcgtttcggcgaaatctacacgacttataatatgattctagcgggcgtcgaactcgttcctgaggcaaccctcattatgaacgctgacttgcctctcttttcatcggttgaacttcctaatccaaagatttattacggattcaaccacttaccagatggcgaaatgatggctccaagcaacacagacggcgttttgtgccccgtttgtgatcacatcattcattacaaattcatcagttatgccagccaagggaagttttactgccctaattgtggctaccaacgacctgaattagacgaagcagtcactgccatcaatcagatgcaccccacaaattcacactttgaaattaacaacgaaccgtttgaaatttcaattggcggcatgtacaacatctataacgcacttgcagcctatagtgtcggtcgattctttgatattccagtgaaagcaattcaaaaggccttcactgaagacaaacgaatctttggccgtcaagaagtcattcaattaaaagacaaagcggtcacattggtactcgttaaaaatccggttggcttaaaccaagtcttacaaatgatcagttctgatccagaagacttttcactcgcaatgttgcttaatgctaactatgccgatggaattgatacgagttggatttgggatggcgagtttgaagacttactcaaacacaacattccaaccgtgattaccggtggcgaacgcggtgacgatatcgctttccggctaaaagtagccggtgtcacggcagatcaattacacgaaaccaaagaactcgatgcaacgatggcagccattgaagcagccccaaccaaacatgtttatgtattagcaacttataccgctgttttacaactacgtaagaagctggcagctgccaattatattaagaaaggactatcagtatgacccagacattaagaatttgtcatctatacggcaatttaatgaacacatatggtgatcttggtaatattttagtccttgattactatgccaaaaaagttggcattcaaactgaaacagaagtcattagtatcggtcaagatttcgatgcaagtcgttacgatatcgttctcttcggcggtggccaagacttcgaacaaaaaatcatctcagaagacctcaacgacaaaaaagcagccctcaccgaatacattgaaaacggtggtgttatgcttgccatctgtggtggttatcaattattaggtcactactatattggcgcaaacggcgacaagattcctggaatcggcgcacttgatcattacacattgagccaagataacaatcgttttatcggtgatattgtcatcgaaaaccgtgagtttaacgaaacctacctcggttttgaaaatcacaacggccggactttcttgggcaaggatgaaaaaccacttggttacatcaaacgtggtcacggcaacaatggtgatgacggcaccgaaggttgtgtttataaaaacacatttggttcatacttccatggtccaattctcacgcacaacggtgttttagccaaacgacttttatcgattgcggttagccggcgttttccagaatttgatttacaacaaatcgctgacttaccactcgaagaatcacgttaccaagtcgatgcagccggcgtcaaacgcgtccaaaattaacaaatcaaaaagtcgaccattatgcggtcgacttttttgatgtcttaatcatttcgcaagaaaaaatacactttttattcataaaatgataatcgtttcacaatacttgctcggtatactgactttaacctataaaaaggagcgaatcattatgttaaatcaaatgccagcagtcgagtccgttcaaattaatcggattgaaaatcatgataaagttttcgcaaccactgaaagtggtcaagaaatcgaattacatattaccgaccaacaaaaaaaggaccgcctcttctggaaatccctcatcaatatcctccgcgctgaattgtggttacccctgcaaaagagaacccacgaactactccaaaacgactggctaacggtcgatggctagcgtgtggctctgggttcggatgacttacagaacacgtttaaacgatcagaacacaactatccaaaagggcgctaacaaaaatattgttaccgcccttttgcatatcaatgtttcgttttttagcgttgccctgtccactccgctaaatactgatccacaaactggtgcatgaaatccgttcgcgcttgcgcgatttcgcgcgctgcctgtgtgttcatcgttgctgccaatttaaataatttctcataaaaatggttaatcacggtagacggttcgcgatagttttcctttgtcaattccgcccgtggttgaatctcaggatcataagcaaccccatcgtgtgcgccaccatacatgaaggtccgcccaatcccaatcgcgccgattgcctctaaccgatccgcatcttgaacgatttgcccttctaaacttagcgtttggtgttgattgagatttttcgaaaaggacatgtggtcgataatatcaaaaattgccgtttgttggccatcttgtatgccgttttcggttagtttagtttttaccttttgtcgagcctgttcaacatcagtcgcgattttttcatcaatcacatcatgcaataaggccgccaagataatcgttgttaggtccgcagctaactctttttgctgaattaaacgggcattattcacgacccgttgaatgtgatcgaatccatgaccgctgtgttctgctgccaattccgttcgtacaaattgttcaattgcttcgatttgtctttgcatacttgtcatcctactcttttaatcattaaaaaaaattgcaaccacggctgcggttgcaattggttatattcagtttacttgttacccggttctgacgcaataatttgcatgtcaccttttaagtcccatgacttaatatcaaatggtaacacaaaatgcatattcttgtgaattgggtaagtttgcccatcggtaatcagttcgccttcaccatcgaccacggagactaaagtatagggtgccgttgtccgatcaaagtgtaagtcgcccttcactaaccattggtaaacactgaaaaatggtgacattggtggttgcacataagtcgtgattgttgaatctccaacatgttctgtttgaatattcaaaacgggatcttgatgcggcacaatcgtcgtatcaattgattgcttcaagtgtagttcgcgtttttcgcccgtcttagcatcaacccgatcataatcgtataaccgatatgttgtatcactactttgttgggtttcaagcgccataatccctttgttcaatgcgtgaatcgtgccacttgggacgtagaaaaagtcaccagtcttaacgggcactttgcggagtaaatcatcccacttgcctgcttcaatcattgctgttaattccgctttggtcttggcatggtggccatagattaaataagcacctggttcagcatccaaaatataccaacattccgtcttaccgagttcggttggaccttcatgagcagcagcataagcgtcatctgggtgcacttggacagaaagacttgcttcagcatccaaaatcttagttaacaatgggaatactttaccttctgcattaccgaaatattcgcggtgggttgcccatgcttgatctaatgtgagcccttttaatgggccattttcgatggtactaggaccatggggatgggctgaaatggcccaacattcaccaatatcgccgtctggtaaatcataatcgaaggcttcagctaatttgcgaccaccccaaattttttcttgaaaaacaggttttagaaataaaggttccgtcaattcactcactcctaatgcgctttatttatcaatagtcccattttaccacaaatgtaagcggataatacgcaaatttgcgaatttgactaggcttttgtttctaggtgattatccgctaaaaattgtgccacaatcgcatctcgtcgttccaaaaagaccggattatcagccgttggatgaatgcgattactcaggacaatcagccccgtttgccgcttgcgatccaatagcatgaacgtgccggtaaaaccggtgtgataaatcagtggctggtgttcttgcggctcaaagcgcaaatcccagcccagtgagcgcccgagatgttttggtgtccaatcacgatagagactcttaacactcgcctgactgattggtggctgttcaaccttcaactgccctaattggaactgggcaaagcggacaacgtcttttaatggggcaaacaagccggctgcaccactatgattttgtaaaatcgcacttttcggatcgtggaccgtgccttggattaagccgcgttcggcactcaattcagtcgggaccgccaaacttttgtccggattaaacgtactggcttgcataccgagtggggttaaaacgagttcttgaatcaaatcctgaatcggtttttgatagatggcttcaatcatccagcccaaatacaacataccaatgtccgtgtaaacaaccttttcaccaaaatttgggccgaccgttaattgcgtcaaaagcgccgtttttaattcggcagccgataattgattccgattcggaatgtagcctgttaaaccggacgtgtgcgtcaatagatgcaagaccgtcacccgtcgatctttaaaggccggcaacaaactatgcacttttgttcgtaaagaaagccgccctttttccaatagccgtaaaataatggtcgtcgtcccaatcactttcgttaatgacgctaaatcatacaactgatcagcttttaacggcactttttggggcactaattcggcctgcccgattacattagtcatcacttcagggccttcgatgatggcataagaaacaccagggacaatcccttcatcaactagcgcttcaatttgccggatggtttgttcaaatcgcatgttaaattcctcctactacatcaatatcactagtatacgccaaacacggacaaaaataaggccgcagattttatctgcggccttatttgcgtcattcacgcttaaattttaacgttgcctgagaattgactattgtacaagtcagcgtagaaaccatcttgtgccatcaaactatcatgagtcccggtttcaataatcgaaccgtgattcatcacgatgatgttatcggcatcgcgaatcgtcgataaacgatgggcaaccacgaaactggtccgattttgcaacaagcgttccatggcgtgttgaatatgaatttcagtccgtgtatccactgaactggttgcttcatccaaaatcaaaatctctggatcggcaacaaaggcccgcgcaatcgtcaataattggcgttgaccttgggagatattcgaagcttcttcattcaagaccgtctcatagccatcaggtaattgacggacaaaaccgtcaacgtgcgctgctttggcggctgctaaaatggcttcatctgaagcatcagcgttcccatatttcaaattatcccaaatcgttccagtaaataaccaagtatcttgtaaaaccatcgcgaagtgacgccgtaattgttcccgagtcatatcgcgcgtatcgacacctttaagcttgattgaaccgccactcacgtcgtagaagcgttccaacaagttaatgatggttgttttaccagcacctgttgggccgacaatcgcaatcatttgacctggtttgacttgcaagttgtaatccttcatcaagatatctttaccttgataaccgaattcgacatgttctaattcaagtagattttggtcatcaacaatcgctggcacttctgatgggtcgtcactcatgtcatcttcatctaagacttcaaagacccgttcagctgaggcaatcgttgattggattgtattcgctaagttggccaattgcgtgattggttgtgagaattgttgcgtatattgcatgaacgcttgcatatcccctaaagtaacttggccgtgagaaacacgaatccccccaacaattgctacgaagacgtaaccaatgttattgacgaacgtcattaacggcatgatgactccagaaataaattgtgccttccaagctgctttatagagtaatgcattttgttcttcaaaggcatcaattgtgacttgttcgcggttgaaggtctttaagaccacttgaccagagaaattttcttcaatttggttgttcaacaaccccaaacttttttgttgcgctgcgaagaatttctgtgatttcggtgcgacaatcccgacgacgactaaactgagtggaatcgtgactaaggcaattaaagtcaattgccaactaatcgagagcatcatccacataacgccaataaatgtcacagcactggttaccatttgcgttaaactttgttgcaaggtacttgcaatgttgtccatatcattaatcgcacgactcatgatatcgccgtttgagtgtgtgtcgtagtaattaatcggtacccgttgcatcttgtcttttaattctttccgtaattcatagacggtttgttgggaaatccgcgtcatgatgaattgttgtaagaaactgaaaaccgctgatgctaagtacatcaaaatcaccgtcataataatgtgttgaatcttatcgaaatcaattggtaagccattcatcggcatgcccgctttttgcatggcattgcccttcataacacccttgaagatttcggtcgttgcttgtcctaatacttttggtgttctaatttggaaaataacggagatgattgctaaggctaacacaatcactaatccgattaaccggctagacatgtaggttaataatcgtttggttgtgccccaaaaattcttcggtttttcaacgacaccacccatgccacggcctgggccatgtccaccttggggtcgattggttgttgttttttcagccattagtcttcatccccctctctgatttgtgagttaataatttcttgatatgtggcgttattagccttcaattcagcatgtgagcctttaccgaccagctggccttcatccaagaccaagatggtgtcggcatcggcaacggttgatacccgttgaccaacaatcacaacgacactcttttgaatttcagcatcttcttttaaggctttccgtaataaggcatccgtcttaaagtccaacgctgagaaagaatcatcaaagacataaacagccgcttttttaaccaacgcccgtgcgatggcaagccgttgacgttgaccaccagagaagttgcccccaccttgttcaacgtgactatctaagccaccttcaagttcgctgacgaaatctttagattgtgcaatttcaagtgcgtgccagatttcatcatcggtcgcattcggattcccatattgcatattttcccgaatcgtcccggtaaataagttcgctttttgagggacaaatgcaacttgttggtgaatgtcatggagggtcacatctttcacgtttaaccctttgactgtcacttcacccgtttcaacatcgtaaaaacgaggaatcaagttgactaacgtggtcttccctgagccagtgcctccaatcacggcgactgtttggcccgctgtcatttggaaatcaacgttttcaagcgctaagtgttccgcattttgataacggaagttgacctggttgaaagccaagcttgctggttgatcaccaaacgttttaggcgtcgctggatcttcaatcggcgtgtgtaaatcaagcacttcattaatccgcactgctgaagcttgcgcccgcgggataaagacgaagaccattgaaagcatcatgaaactcatgaggatttgcatcgcataagtcacgaacgctaataaattcccgacttgcattgcttgattggcgattaagtgtccacccatccaagtaatcgcaatgttagtcccactcatgattaacgtcatggctgggaacatcactgacataatactataaactttcttcgcattttgcgtgtagtcagtattagcttcatcaaaacgttcttgttcgaacttgtcgcgccggaatgctcgaatgacccgaaccccggttaaaccttcccggaaaactaagttaatccggtctgtctttttctgcattgccttgaataatggcacagcgaagtacatcaccccaccaatgaagagtgccatgattggtaagacaaccaagaaaatggatgtaagttgcgcatctttttgatacgctaagaaacttgcgccaatcaacatgataggtgccataatcatcatccgtaagaacatcattgccacattttgaatctgcaccacatcgttagtcgtccgcgtaattagtgaagacgtcccaacttgatccatttcatcgtgtgagaagttgatgaccttccggtagatatctgaacgtaatttttggcctaagccttgtgacgtccgtgccgcaagataaacgttgcagacggccgcgataatactaattaatgaaaaacctaacattttaaagcctgcttgccagatataatcaatattccccttagcaatcccgtcattgacaatgtcggaggttaaattgggtaaataaaggttactgacaacctgaatcgtcatgaataaaaccgcaccaaagacggcccaacctgacattcttttctttgcaagtttaagcatgttgtgtgtcccttctttccttatccttgtttgctggcccctgtttctaaccagcctaatactaattcgaagcgttcttggacctgttcaattgtaatcgcatggtcactttcttgttgcagataatacgctgcaatactttgaaagaccgtcgtcatcaactcatgaaataaaattctaagcgcttcgggttgatctgcgttaatcttgagcaagtcgtaattgacgttttcttctaaaaagcgcatcccatctacttgtttggcatgcattaattctggtgacatcttgcgctggttcttataatccatatgtaagaagaggtgcttgtaaaattgtgcattttcaccattaataatctcttctaccatttcagcaaagaattggcgaattgccttgaatagatcaccatgaacagccaacagactcttttctaaatcctgctttgaactgtcgcgtaataagctaaggtcgtagaaaaaaatatccgccttatcttcaaagtactgataaaaactgcctcgcggaatctccgccgttttaataatgttgctgacagatgcttcattaaacggtacccgtgaaaactcagcatgcgcagcttgaatcagtcgttgttgcttttcctcaggtaatctaaaaaatgttttcttcggcatttcgatactcctttctgaaaattaatgacagagcgtcataattgtgacgtaatgtcataatacgccaacttaggcactcatgcaagcattaaatccacaaaaaaagaaccggcaggctatcgtctgccggttccctttaaaaggcgctatttatcgtctttgtccattttttctttaatatcatccatcacgtcattggctttttcagcaactttgtctttggcatccgctaatttttctttagcttcacccataaagccctttgctttacctttggcctcagtttcgcgatcaccagtcaccttaccggctgtttcttgtactttaccggttacttggtctttcatgccatctaacttttctttatctgtcattcaaaatcactccttcttattggtctacctatatgataggatagctaaccaacattagtcaaaatttatgattatgagtcgcattatgtcagtttaccatcgcgcatcacgtattgatgatctgtataatccaagacgcgttcatcatgggaaaccatcacaatcgtctgtcctgtctctttcgtgattttagccagctgctcagcaacctgtaaggcccgtttactatctaaactagcggttggttcatccgcaaaaatcaaatctggctgaccatacaatgcccgagcaatcgcaactcgttgacgctgaccaccagataagctcgttgggtactgacgtcgttgatcccaaacacctaaattggttaatagttgttcagctgattgtggcgcttgcttttcacgtaatcgatcgactagttcgaattgttcttcaaccgttaaaaatggaaccagattcgaactttgtaatataaagccgaaatcgttaaaccgtaatgcagaccgctgtttttcgcttaattgactaatctcttgatctttaaaaaagagcttcccactcgttgggccttgtaaactacccataatcgttaataaggtcgtcttcccagaaccagatggtccggttaaaccaatgaactggcccttttcaatcgttaaatcgatttgatctaaagccgtggtttgctggtcgcctgcgccaaattttttgacgattttttctaaacgcattaaagccatcctatgcccctccaatcgcatcaagcggatcaatctttagaatccgccaaattgagaataaagcgccaatgactgtcatcacaagtaaaacagcagaaaaggccccaattagtaaaggattatttgtatacggcaccgccgctggtaataccaatgttgtcaatgcgttacacaacaaaccaaggccaatcccaatcacccctaagaatacagattgccacattaaactaccaactaattggccacctgaaatcccttgtgctcgcataaccccgtatacggccgttttttcaatagtaataatatacatgaaaatcccaacgataaaggcgacgatgactagcaatgcgccaatcatcaaaccaaacgtcttaacctgtggcccataccccggaatcttatcgattaattctggaattgtcagtttggtcagctgatccgttgtcttaatccgcgcgtttccctttaatactaaagcattaatgcgcgtaatctgatcagtgccgtagcgcattcggctaaaatcggtcaaccgcaaataagtcaccggttgcgtattatagcggtggttcgtcgtaatcccaacaattttgtacttttgttgacgcccattcaatttaatttgttgatttaaagcaattccttgtaagccgtcgtcgaccacaatctcatttgcctttttaggataccgtcctttttgcaacttaggcttcaaaaaaacatcaaaatcgataccaaaaacactcgtattttgcttacttaaacctgaaccactcacaacacccatcatctgagcaagttgcgcatgatttttctgtgcacctttaatagagggtaattgatcaacatctaattcagaagcagccaagtttttattcgcatactgactaataacaacttctttggcgtgccattgatcaattgccgaacggttattattggctagcccatatgccaaccccgttaaaaaatagattaaatatgcaattagaaaaatcgtaaaaatgatcaatgaataacgtaatttagcatgtttaatttctttaattgctaaatacatccaaacacccctttcttaactgttttaatctaacataaagcatcgtgccttgaacagcaatccgcattcaatcttttattcattcacgggaatatgctatgataagcacacggaggtggcgcttatcaaacacgttaaacatgggattgcctttttgcttctgattatcatccaacaagttcctttaatgattgtcagtggcttaacattgctccctaaggctcaacagacaacccatctaattttagtctttggttggctttttctaatcacaactatcggcattactgccctgatgtggtattactaccaaaaaattaaatcaacgcgttatgaccaacccttcaccaaacagacttggtggacaatgttgattggctttatcgcgatggttgctgtcaataacggtacaatcccgtttatgcatactaccggtaatgccaatgttgatgcactaacctcagtctttcagacgattggtattttcatgctaccatacgccctattcttaggtccgattatggaggaattacttttcagagggttcctaatgaattggtttttcccaggcacaccaatcatctcaatcgggttaagtgctatcttattcggattgatgcacggcgcaactgatccgatttatttcatttcaaaagcactgcttggcctaattctggctatcgtctactatcgcacctataatattaagagtaatattgccttacacatgttgaataacattactgctggctttacgattttttaaacgactagaaaggaagcatgactatgtctgcattaacaaccatcttaacttacatccaagaacatcctgatgaagtggttctagaaccgtttcaatatgcgaacgtgattcgctttggcattagtgaccaagtcgatctgccagatgccgagaaactgttccctgatatgcggctacacgttaaccggattgaccccgagtacgtcaaagaacaccatgacttattgacgactttttatcaacaaaccgaagaaaaacaaaaagacggcttccaagatgtgtggattactaccgcccatcttagtgaccgtcaactttatttagtggatctttcttttgaataagcctcattttgaacagctaaaggtcagctgtattaagtatgctattttaaccttgtttctctttgtcatgcgtgcctttattgcgcatcccatcattctgattgccagttggattagcactgctgtttgcggcgcatatttcattgccatgttaattgtttattattacggctaacgttgcatatgtttggtctcagcaatcacttcttctgtaaaatacaattgaaaaccaaagaacaccgtcaacataatcgcagctatccatgcagtgcgcacattgattaacttaacaattaaccctgagctaatagtaccaatgaagaagctaccaacaattaacccgaagtaccgggctttttgttggtagtttttttctttggtcgctaaatatagataagtattttcaattaatttcttataattgccggtcgtaaaagcattcgcatatggatagccattaaccgttgaataactcgctaattgcatggccatcgacatcgacagaatcggtgtcacaaacatgttgggaatcgcggttgataaaaaaccaactactactaaagcaataatttgaaaccctaataaccacaaccgccaaacattcaacccaccagtgttaaaatgccgcttcgccagctgcacaataataaccccaaacccaaatgaaataatgggtaatatcttttcaggaagttgtgcccactggttcgttgcgatatctaagccgatgaacacgatattaccggtctgtgcactcgcaaagacgccaccacgtaaaatcacacaatacgcatctaagaagccaccaagaaacgttaaaaacatcgccgtgcttagccgatcatgaaaccctatttctttttgcaacccaatccctccaaatcaatactcttattatacgcaaattaaaattgaaatcaaaaaacgaattgcactatttcacagtcgaaataaggtacaatccgctttacactataaattaattgaattgacatcttgaccatggaccacttttctaaagtcgaccagtcctaagtccaaaccgcgcagcaatacttcagccgtcccgacgttggttgccaacggtacttcataaacgtcagataatcgaattaatgcattcacatccggttcgtgaggttgagcagtcaatggatctctcaaaaagattaccaggtccatcttattttctgaaatcaacgcgccaatttgctgatcgccccctagaggacctgacttaaaccgtgtaatcggcaagccagttgcttcaataattttttgaccagtcgttccagtcgcaaataattcgtgttgcgccaaaataggtttataagccgtcgccagtttcacaatcgttggtttctgacgatcatgtgcaatcaatgcaattttcatctgaatccctcctaatgtctgcggtgtttaaccaccgtaaaaaagtgtaacacacttgccaatagaatgaagaagattaaaacgaacgacacataattaagccaaaactggccaattggcaacactaagttcactaattgttgcagtaccatcgtaatcaaggttgcacaggcgaccatgccaaatagttgtatataccgtttcactgtatcatccgtcctctttgctttagattgaatgcttgcgccgacttggcgacattccgcttgtttctgcgctgaaagtgtctttaaaccatacgtttttgtctggacaacttcccggatttttaaaagtccagctgcccccaagactttatcaaaagttctaaaagtcccgtcagtcacaccagtaaccaattcctcagctggactggcataacaactactaatcgtaatgtaacttttgcctttgaagcgatctggtaacgcatctcccgcccgattaaatcggactaaccgttgccgcacgcaatccaaaaagttcttcatcacaccagacattgcgccccaataagttggcgcagccagtatccaaacatcggctgccaataacttagcttccagttcatccaataccggattggctttgccagtatctggtaatatttgataatcatttaaaaagatcacttcaacgtcatcttccggttttacacctgctaaaacggcatctaaaagttgcccattgaccccatctcgttgatgactgcctaacactcctaaaatcttcatctgatcaagcctcactctttatactactttcagtttacacttccaatcactaacttaccataaaaaaacgcccagaccaatggcctagacgttgtcattattttagtttagtaccaaccattacttaaccagaagctcttagcggcatcccatgaaccataacgacttgttacatattgatctgcaacgcggtcttggttagctgctgaataatcaccatttaagtatgaagctgataattgataacggccgattaattgaccgttacgtgctgaatatgaaccgcctgattctttttgtgcaatccattccttagatgaactcgttgtagttgttgtttgtgcagctacaggtgcttgttgtactggtgcagcttgaactgcaggttgtgcttgaactacaggggctggtgtttgaacaggtgcagctacttgttgagttacaacaggggctggtgttgttgccacttgatcagcatcaattgttaattgttcaccaacaaagatcatattaatatcagcaatattattagttgttgcgatttggttaacaagctctgtactaccattgaatttttgcgcaatggttgaaagcgtatcaccatttgcaacggtataagttgttgcggcactggcttgtgattggttaatgaaaagtaacccggttgttgcaacggttgttaaagcggcactgtaaagtaaagtttttaaagatttcatattttgaatggactccttattgtttaaattgatttttctatctgtttaacgtgggactaatataccatcttaaatccgttagtaaatatcaaaaccataacaattgatgacaaatccgtaacaaaatgacggcaatttcacctaactttgtaatgaagcccacaatttaattgacatgtaatcggcctaaaagctaataacaccaaggattacagtcaataaaaatgctaaatatgctattttgaattaattaaccttctttcaaaaataatcgccccatttaacgtaataataagacgaggtgatcaaaatgaaagttttaaaattaaatgatttagatttaaacgtcgcattggatgatcgaatgattcaaatttccggtgctcaggacaaaacattaattttcaaaagtaagctattagcacactattggttcttcaatttacgggctttagctaagattgcggatcgctatgcgatccaaatcatgtttgagacagagaactacaaataatctgccctatcgatatgaagccacaaaaaaagagctgattactcagctctttctatcttaattgggtatatagggctcgaacctataaattccggattcagagtccggtgccttaccaatttggcgaatacccaatatcatcaacgaatactatgatactgcacactccagacgttgtcaattatgatttttaacaaatctttaaaagaggactatactattcttggaggtggttccaatgatgaaaaaagcagaaatcgaaaaattatttgacgggaaagttgccgtatatgatcaagaccacgttgtgattgattggatagattcacgcaggacgcttgaagtcacaattgataacgatattctaaatctactgataaaccatcaggactatattcggaatatcttgaaacatttaaagagacaaacaaatcgcaccatgaccaaggaaattgttaacattaatcgttgtaactataaaatcttcatttagcctctctagagtcaattaaccattgacattacaggctttattcgctaagatattagttgttccgaacattgcccgttggtcaaatcggttaagacgtcgccctctcaaggcggagttacgggttcgatccccgtacgggtgatatttaaaacagcctagaacccagaaaagccgttaaactaaggtttagcggcttttttgtttatttaaaacgtgtaaaaaagctagcctcctgacgctttagttagggggctagtttttttattgcgtagatttcttctattaaaatggcttcatttgccacaattatttggctaccaaaccagccactgattaaaccttccaccttactgggtacaataccttctattgaacgttctgctttgtcgatttgaaccggataacatttaacaattgcgtcattgatggtattagcaatcatctcagcagtcatcgcctcaatgtgtttttcattgcgcttacgatcttgtacgcggttattcttatctaacactgccgtatgatcgcttaaatagaacccttgccatttcatcatgccacgatcataataatcatacttcaaaaattgattaaccaaattgggatcatattcatcattattcataggcgttccctccagcatgcccaccgactaagccagcacgctcaattgcagtcgcaccttttactttgctagacaatttgaccaccgatgtaaaaccgtagcgcttgcgaatttcatcgaccgtgctatctaatttctgctttttcaaattaataaactgtgtgtcgaacatatctaattgttccgcactatcgtcaaccaaattgctgcacgcaatactaatatgccgaatcgattcgtgttgccattcttcacgaaaaagttggatggcatgttttgtgagttgctgattagcattagtcgcatcaatcttcattgaacgcccaaaaccaccacgcgatgcaccctcttttgcagcaaatgaaaagccaatccccagactgataaccgttgtcgccttgtgatgcgccctaagacgtgcagccacttgctctgcaatttcccgaatcacaacttcaatctcagcttggataaaataatcacgtggtaatacctgactattcccataagacttctctttggccttatatttatgccgcacaacggcccgatcaatcccccaactaaacgcaaacaactgcgcgcccatgacacccatttcttgttttaaccgatagggatttgtatgcgcaatatcgtacatcgaatgaatgtgtttctgattcagtttctctgccgtacgatgcccaattgaccagacatcatctaactgggtcactggccacagtttatctgggacatcttcataatgccattctgcaatcaaactgtgattccgtttggcctcaagatccaatgcgagcttggcaagtagcggattatcgccaattcccaccgttaaataaatgcccgtttctttttttacagccagctgaattttacgtgcgacttcgtacggcgtcgctccaaagagttgccaactatccgtgacatcaagtaacgattcatcaatggaatacggttgaatatcttcttctgccgtaaattgctgaaaaatacggttaatcttctggttctcttggatatacaaattcatcttgggtggctcaatgattaaccgtttatcatgaattggaacatcccgggcacgtgttacgttactgataccaaataatttcttagccatgggactggctgccaatactaaaccactgcccgtgtttttctccgtggacatcaccaccaaaatagcctttaacggattcagtttcaaccgaacggcctctactgatgcgtaaaaagatttcgaatcaatcattaaaatcacgcggcgtggttcattctgatagtcatacacgactcttcaccccaacttgaatctgacgcacttgttcatctaattcgcgttgccaccgattaatctcaatcaaggtgacggctgatagatgacgataaataaattgcggaaacttatcgcggttgtagtaataattcattgagtcaatcaaatcatcactatgattcaccgctaatcgccgcaattctaaaactccaaagccatttaaatataaactcaatcctgtttgatctagcgtaatcacttctttattcgtatgcatcaggcacacctctttaattcatcttatgtcctcttaattatacgaacatacattcgatttagtcaagtgtgatttctcagagaacaaaaaacgctcaatcaaattaaatttgattgagcgttaaaggaaccttaaattttaataccaaccgttacttaaccagaaactcttagcggcatcccatgaaccgtaacgacttgttacgtattgatctgcgacgcggtcttgattggctgctgaatagtcaccatttaaatatgatgcggttaattgataacggccaatcatttgaccgttacgcgctgagtatgaaccaccagattctttttgcgcaatccattctttcgctgaactagttgtcggtgcaacagcaactgtttgttgaactggtgcagcttgcactgtaggttgtgcttgaacaactggtgctggtgtttgaacagcggctggttgtgcaacaactactggcgttgtcgtttgaacaggggttgctgtttggtcagtgtcgattgttaattgttccccgacaaaaatcatgttgatatcttgaatgttgtttgttgtggcaatttgattgactaaatctgtgttaccggcaaatttttgggcgattgttgataacgtatccccagttgcaacggtataagtagtagcggcacttgcttttgattgaccaacgaaaagtaatcctgctgttgcagccgttgtcaatgtagcgctaagcaataatgtcttaaaagatttcatgtaatagatgtgctccttgttgttttgatttattaacgtgggactaatataccatcttatattcgcttgtacatgtcaaaaccataacaattgatgacaaacaggtaacaaaatgacggcaattcccgcgctaattgtaatgcacaccgcttacttgactgctattacacaaataacgcctaggacaatcttctgtcctaggcgttataaactaatttattgatgttattcacgacgttttaaatgatacttagagaccgatttttggcggccaagaactagcggaatacgttccacgaacacatcactatagtccaatccaaaccatgaagccggtgtatcagtgaatttttctaaccataaacgcatttgaacaatccctttatccattgctcgaatttgagttgctggtgataaatcttcttgcatgatcacaaacgagaaatcaccaacgttccgatttggaattgttgtgtagcgttgtggttgtgctggtaattctccccgatgaatcatttcttgaatgatttgacgaataaagatgttcactttttgttccatcttaaagcctagatacaactgaacgttgacaatgtagtccgtcccaagcgtatctgcggtatattctgccgtatacggttcatcagtaacattgaccgcaacaaaccagtaaacttgcgcccgttttggtcgtttatccaaaatagaataaagaatattcttcttaaccatattcttttcatatggtttattctgtggttttgaaagataaaccaaattagtcgtatacatagctaacgctgtatcgtctcgcaaatcatgtagttgttgtttataagctagtaatgaaaccgtacttgccttgaaagtattactttccttaatcgtattactacgataccaaacaaacatgatcgatagaataaacgccgcaattaagactgtcacgtaaccaccatgcatgaatttagcggcacttgagatgaagaaaataacttcaattgtcccgaagaagatgagtaccaaataagccaatacccatttcttctcgcggcgtcccaagtaatggaatagcaagatagttgtcattaacattgtaatcgtaatcgccaaaccgtaggcagcttccatgtgcgctgagttcttaaaatagaaaacaaccattaaacaaaccgcccatagaatccagttaacgattgaaatatagagttgcccttttaacttagccggataatcgaccttaattcgtggtaagaggcgcaacttgattgcttctgatactaaggtatatgaccctgaaattaaggcttgtgatgcaataatcgccgcaattgtagccagtaaaatcgctgggacctttaattgggctggcatcacttcaaagaatggattgaaatcagaaatatgttgatatgccgcaatatctttatgttgtaataaccaaacaccttgtccaaagtaattcaacactaaacaaagcgcaatgtatggccaactaccatagatattcaaccgcccgacgtgccccatatccgaataaagtgcttcagcccccgtagttgccaagaaaacactgcctaaaattagaatccccaccttattctcagggctaaacagtagttcaatcgcataatacggattgagtgccttgagcatcgttagatcccccattaagttaaccaaaccaatgccaccaataaaggtaaaccaaattaacataatgggaccaaaagatttaccgattagatcagtcccaaatttctgaatgaaaaataagaccgataagatcgagaccgtcaataaaatcacctgatcttgattattaattaaaacgttcccattaattggcaaaccctttaacccttcaatcgccgtcgtgactgtcacagcaggtgttaacatcccatccgctaataacgtcgccccaccaataatcgcggggatcacgagccacttagcttgcttacgaatcaaagtgtacagtgcaaaaatcccaccttcaccattattatccgcccgcaatgcaatcatgacgtacttgatggtcgtcatcaacattaacgtccaaaagacaagcgaaatactgccgatgataaaatcgcggctgatgtttaccaaaccgccattcccctcaacaactgatttcataacatataatggcgacgttccaatatcaccgtaaacgacgcccatcgtaatcaaaatccctgcaactgataatttatgtccagttgtttgtttagttgtctttaatttcatgatttgttacttccttatactccaatatagcattatcgtagcttgttccagattgaaagtccagtcttatcatcaataattatcaatccactgtattccatgctataatagggacactgaaacaagcgagggatacaaatgaaagataaacgtcaatttgaaattgctaagaagcaatacaagaaactagcgaaccgaccactatcaaaggaacgtaagaaagctgttagtaccgcttcaacttacatgttcacaatcttagttgtggcctttattctattggttatttacttgttcgttcactaaaactgcgtaagcagtttttttttacgtattttttttgcagaacatatattgaatattatttttcgtacgtatataattgaataaatagttttttaagcttaaattactacaaaaaacacgaacattatcgagaaaggcggctctcatgccctcaaaaaaacaagtttatctcgctggcccattttttagtcccgaacaaaatgatcggttagatcaagtggctgatttactcattaaaaacccgacgattgatgctgattcacttttcaaaccaggccaacacccttatcctgatgcagaattcggtactttcgaatggcaagtcgctacttttaatgttgatacgcgtcaaattgaccaagcagacgtcgtagtcgctgttatggattttaaatctgaagaaggcgaattcgaacctgattccggtaccatgtgggaatgtggttatgcttttgcccacaataaaccagtgattctcgctcgtttccgtgataatttaccaattaacctgatgttggctggttctgcaacggccatcttcaatggtgaagcggatattgaaaacttagcgacttatgatttctttgaattacacaataaatatgttcaaacagatatcttttaactcaaaaaagaaccgactgatgcgtcggttctttttctttggcctaaaagccgttattctcgctcaattcacggtaccatcgaccactcttcttcatcgtgcgctttacctcatggtccaaatcaacacagtagaaaccataacgattccgataaccatctaaccaagaccaacaatcattgaaggtccaagtatgatatccaaaacaactgctgccggcttcaattgcacgatgtagttgcgtcagatgttcttgcataaattcaatccgataatcatcttgaatttgcccatcttcacccataaagcgttcttcatcggtaacacccattccgttttcagaaacgtaccacggaatgttgtgataatcatttttcatcatcattgccacatcgtacaatgcttctggataaatctcccatccacgatatggattaatcttccgttctggccaaatataattagcatataagtcttccggtgtttgtgctgggaacttcggattctctggtgcttgaacccgcattggttgatagtagttcacgccgataaaatcgacacaatgatcggcaatcaattgccggtcgccttttttcgtcattggtaataactcatgttttgttaagaggttaattaattcttctggaataacgcccaaaacagttgggtctagaaaactcttagcgagtagtaagtcagcattttgtttagccattaaatcctctggtgcatcactcttagcgtaagctggcgtgatatttaaaataatgccgatctgactatccggcttcacttttctaaattcagcaacagctgctgtatgcgccatcaaggtatggtagccaacctgaacagccttcttgaagtcaacaatgtctggataatgatagcccgttaagtaaccacattcgatatgcacgataggctcattaaaagtcgtccagcgatcaaccaaggcaccaaacaattcaaacgcagtttttgcgtagaatgcaaaggcatcaactgattcgcgtgtctcccaaccgcccttttccattagccaccaaggcatatcgaaatggaacagattaatgatcggtgtaatgtctgcatcacgtaagcgcttaaaataatcccgataaaaatcaaccgctacttgattaacatgtttgccatcgggcattaatcgcgtccaagcaatcgatgtccgaaatgagttcaaaccaatcttttgcatattttcaacgtcttcacgatacaaccgataagtatcactagccgtgtcaggcccttgatcgctattaaacttatcaggttgcatctcaaaccatttgtcccaggttgatggggacttaccataacttagggagtatccttctgattgaggtgcggatgttgctgctccccacataaaatgctctggaaatttaatcataaacgctactctccttaaatgtaatcgccaacattttatattgtaccatttctctaaagtggtcgcacacctttctcagtcgattatttaatatgcgtacctccgaaatattatacacgttaaataaattgtagactgagattaataatatgcattattataaaataatttatttttttagggttttacacgtaaaagggttgtaaacttccgttattttatgatatattcaataacagaaatgattaatactcccccaagtaagatcatttcaatattcagaagatactcggtataggcctttcccaattaaggtttatgccgggtattttttgctttgaaagcaaaaaaaatagtcctgacggactatttttagaagcggtttgttatgcaaaaatcatttggaaaatacctgcaccacagatggcaccgataattggtgcaacaactggcacccaagcgtaactccattgtgagtcgcctttgttcttaagcggtgtgaacatatgcaccaaacgtgggcctaaatcacgagcaggatttaaagctggtcctgttgggccacctaatgaagcaactaatgtcatcaccaataaaccaacaacaatgtggccggcagcgccaaacttacctgcaccaattgctaaagcaccgaaaactaagatcaatgtgcctaaaaattcatttacaaaaccattcatccggctatgagcagcatcgattgttacgaatgagcccaagatgccttcttggtttgttgtgcgatcataatatggtttgtaagcagcaaccaataataattgaccaaccattgcacccaagaattgaacaatgatgtatggtaaaacattttcccaagggaataagcccatcactgcaaaacttaatgtaacagccggattaagatggttaccggaaatgctcccaaacataacggcaggaatcataaccccacaaccatatccaaaagcgattaaaaaccaatcactactaaaaccttttgttccttttaattcaacgttggctactgccccgttaccaaaaataatcataattgcagttccaataaattcggcagccaaacgggttgtcaaagaagcgtccactactattcctcctataaatgattcatatttttacgtatcatattataatacgggaaaatgcaaggaaaaacaattgacttttctgtttaaatccctttcatgagaagattcatatttttacagacctttctgtaaatttgacttgctaatatctcataaaatgggataatattcattgactaaccgtattaaccctgattatccgattactgttttggaggttactatataaacttaatactcgccatcgttctttatgcaggccttgctgtctttgcatttggcattatcctgctcctatttttcttaatttttaaaaaacggcttaaagcccctctaattatttgcttgattggtttgattatcgcggcatctcctgttggctataacttctacatggctcagaaagaacaccgcgaagaactagcgaagattgaaaagaaagataaaaaattcgataaagctgaacgccaattcatcaaacatattaaaaaatcgactgttgccactgaattcatcgctcaaaagtataataaagtttggggcgagttaacagaaaacggaacagttaacgtcgcaaatgttgattataacgatcatgatagtgctgttgctgctgaaggtcggcgtttactagcacaaggaaaactcgatgacgctgatgattactatgtcagtgctcaaggtgactaccaaaaaatgaaagactacgcgactgataacaatcgccaagaactcgtttatgccaaagatgtcttatccaagactgggtcgttcgtctctgttgcaacccgtccaaacggaactttccaagaatacactgatgatgtttacaaggctaatcaacgacatgtccgcgcaattcagaagttgaaattttcttacagtagtattaaatagtgaatatggtgattttgaaaaaaagatgaaatgggttacaatgaagtagaagactggggagtcttttattttttgattcatagttaaccctattatcgattgggagtgtgagaaatgcgtcacgtcaaattattattcatgattttaggtctaacttttattttaaccgcttgtgggaatccggttaaagcaaagctccacgaaacaaacagtggcttcaatgcgcaaatcactggtaagactaaacataaaaaggtttattggcaaatcggtgataccattcatacgactaaaacaaccgatgatgctttcgcattcgaagtcccttacaaagctaagcagtaccggattacacttgctgataatgaagaaatgcgtaatccaacttatgttgaaggccctgtcgcaaaagaaattgtgcaatggccgaactttattcagatttataatccgattgcccaacaaaaaggactgggcgttttcgaagcgaatccacttgaaggcattcgcactgatcaagttgacagcaacaacgtgattgccatgaacgtcagtgatagcaaagtactggggatctcaattaaagctctcaacgcaggtaagaatctaacgtttaaaaactacgtcctcgccttttcaacaagtatcggaaccaaaccaacccagattactgaattggtcgaccgctcacttaagaaacctgggtcattaatgcaactgacggatcgcgaagttcgctataccgttatgacgaccaataacaacaagcaacaagtcacacaactttcaattaatcatttataaaaagaaagccgccgaatctacgattcgacggctctttttttatatagtggttaaaaaatttcgggagaaattattcacattcttattatagggcgcagttcaatcaaagtaaacgatacggtcggcacaaattagtggtgccaaattgttatagtcactcaaccagctatcccccatcgaatttaaagtgcttatttacggcatttcttcgtttaaaatgctatattgaaggtaaataaaggaggtcttttttatgtttaattatcagcatattcttatcggtttagatggttctgagttatcagaacgcgctttcagtgaggcgattgaaattgctaaacgcaataatgccgaattagttgtggctcaaattattccagataccctttacacaaatgcacgcatgacttaccctactgaaacaacgacatctgaaaaacatttcgttcaatcgtatcttgatcaaaaggtgcaattcgctaaagaacacggtgtccctaacgtacgagccatccttaaagtgggttcgccacgtcgtgaattagcctttaccatcccagaagaagctcatattgatttaacagttctcggtgtcagtggtaagggcgcctttgagcggctcttaatcggttctgttgcacaattcatcagtgttcattctaacaccaacgtcttattaattaagccttaagccggtttaaagattggttaagtttaatgctttgtttttgacgtgtcccatttctaatatataataaaggtagtttaggagtggttcgaaatgccgtttgatatcactaaattgtctgatcaaaatattaagcgctggttcttacaacatcgccaagcaatcgttgcaacccttttgcacccaaacacttggtgggcaagttttaatcgccaattaatgcgctttttccaataatcactaaaagtgacgactgaatttgccgtggtcactttttttaatgacgtttttttaaaggagttctgaccgatgaccgagcaaacttatacttttacagcctcaatccaagccgcgacgattggtaaaggcggtgcatatgtctaatttcctggcgatatccgcgcaatcttcgggaagggtcgtgtaaaagtccacgcccttttcgaccaacaaattccctatgatggcagtattgtcaatatgggacttaaaaagccagatggcaacatttgttacattcttgggggccgcaaagacatccgtgcacaactcaaaaaagaaattggcgattccatcacagttgaaatccgtgagcggctatagctattacgcccctttaaatgctatactattttaaatatttatttcgtcgactaaatttagaatgaggattatcaaatgccaaaacacctttacaagcgcgtggcagtcgttttaatactgattaccaccctttttttatggcttttcacaggaccgaccagaagtgaggccgggatttggttcttccataaaaccacaccccaaaaaattgttaagaaaaaaacacccaaaaaaacgatgctcgacatcacacccatttcacaatttcctgaattaccaaccggttgtgaaattacggctgttgccatgctgttagattaccgtagcgttgacatgagcaaaacagaagtggccgatagtatcccttatgtcaatgatggcgatatggaggtcggcttttgggggaatccatacgatgatactggctacactatgtatcctcccgcttggacaggattcttctatcaatatctcggcagtttcaccgatttatcggacgaaccgattagcacgctcaaagctactttaaaacaaaagaaaccaattgtcgcttggattaactaccataaacaaccagcgcattccgtcttattaattggctatgatcaaaattcatttacctttaacgatccatataccggcaaacgaaaaaaaatctcatttgataaattctggaaaattgctgcaccacagggacaccgtgcaatgacttattaatcattaacttgggggatttaacatgcataaacgaaccattgcagtcactttcattactttaagtagtctttcattagctagttgtcggtcaattaaacctgatcaacaagccgcaacccactccgaaagtttagcacgctatcgcgcctcatcagaagcaaaagaaagcaatcagcgtcgatcaatcgctagctcgaaagaagcttctattaaacaacaatcagaaagtatcgttgcagcttcagaatctattgaacaagcaaaacaacaatctaatcagtcaacaagtgccaaaaaagcgctcactgccgaccaacaaacttctgttaatcaagcttttctagcgtgggcggctgaacgcgccacaatcggaaacatggccgtcagtgattggtattttgaccacggtgctgccggatttggcgattggtttgccaattcacctgatggccgcattttagttcaacctgggacagcaagcccagggtttaatgcctaccctgttcatgcaattggtggctgtgtcttttataccgctttggatggaacagtcggtaaagacaatttagatcgtggatcattcgcggataattacagccttaacatggcaatggacaaaccggttagcaaatacctacttggtgataacggcgtcgtgtatgaacttaaattaggtaatggtcacctcacatcaactaatgatggtttcagcgaactaaaagatgacggcaaacaagcttactcagaaccacttgtctttgccgtttctgaagacaccgctgcccaagctgaactaaaatctttacttgctaactattagagtttaaaggagcacgactatgaacaatgccgaactacaggcctatcttgaagaacattcccgcgtcatcgatacatttcgagccaaaggtttagactaccaaaatgaaaagaaccaaaaacgccaacctgccaaacgttggaacgagaataaggtcgatcgggccgttgataaaatggtcgccgaatttatcgctagtattcaagtgaaaatggcattcaacattcgtggtgaacacgccaaagaatatcaaacttggttaacgttcattgaacaaaatgaagttgtcgaaggcttggaagaatcggttaatgaaatggcgtttgaatattagaaaaagtagtttcttttaacgaataattttccgaaaagtaattgcactggataatattaagggcgttgaattgttaattatccttgtgattttcttatcaatattatatgatttacttacgaaaggtggttttaaattatggttaagttattctttaacgagggctcaaaaattacgctccaacaaaatgacacattatctgcctttggttctacaaatggttcacgccataagttgaccatcagagactgtgctgctgcagatatcgtcgcaaaaatctcgcactttgttaaggacacgccggcttttatcctcgaaaatagtcctagcgaaacttatcacagctcaaatctcattatgattactacacgttaattaaaagactgccgttgggtggtcttttttattttataactcaaaaacgccgctctcttgagcgacgtttttctttcagattaactttattgatttaaataattatataagctgcgcatggtcgcatccgccaacgttaatggctgcccatccaacgtcacctgcttaattgcgacgtaatcttcgaaatcgggtacttccagttgttgatttgcgacaaattcagccgctttttgataaaccttttcagcgttcgtttgaccgttgagatattgaatgactaacattgccatcatctccatttttacttttaatattattgatgaattggtcatctttgataaggtcattatacttggcttactaaaaataagcaatttatatattttattctttatccgtattaaacaaaaagcatttaatccatttattttagaacaatgcaccaaatactgcaccatttcataaaatcaatagactaaatgctttaataaaagtcgaattttatctttataaacgttgaattataggcgttcgtttaattctttgcctaattcttcaaagccgggtttgcctaataaagcaaacatgttcttcttgtaagcttcaacacctggttggttgaatgggttgataccattcaagtaacctgagattgagacagccatttcgaagaagtagatcatgtagcctaatgtgtaggctgtttgatctgggatgttaactgacataacagggacgccgccatcagtatgtgctaagacaacaccttggtaagctttcttgttaacgaagtccattgtgtggccttctaagtagcctaaaccgtccaagttcttttcgtcagttggaatatcaatgtcgctgttagggttcacaacgttgacaactgtttccatcaagttacgacgaccttcttggatgtattgacctaatgaatgcaagtcagttgagaagttagcacttgaaggataaatccctttttggtctttaccttcagattcgcccatcaattgcttccaccattctgagaaatattgcaatgttggttcgtagttttctaataattcggttgtgtaacctttgcgataaagaatgttacgtaaagcagcatatttgtatgcatcgtttttcataacgtctgtatctgtgtattcagtgcgggcatcagctgcacctttcatcaattggtcgatatccccaccagcaacggcgattggtaataaaccaacggctgttaatactgagaaacggccaccgatgtcatcaggcacaacgaattcttcgtagccttctgcatctgattctgtcttcaaagcgcctttagcacggtcagttgttgcgtagatccggctcttagcttcttctttaccatatttcttgatcaacttgtctttcaaaacacggaaagcaattgaaggttcagttgttgttcctgattttgagataacgttgattgagaaatcgcgatcgccaatcaagttaactaagtcgtttaagtaacttgaactgattgagttcccggcgaataatacttgtgggaagtcacgttgttctgctggtaacatgttgtagaacgtgttattcaagaaatcaattgcagctttggcgccgaggtatgagccaccgataccaattgcgatgaaaatttctgaatcgctcttaattttagcagcagctttcttaatgcgggcgaattcgtccttatcgtagttcactggtaaatctaagaaaccacggaagtcgttgcctgcaccagtgccttcacgtaattgtgagtctgcagcattaaccattgcttgcatttctgcaagttcgtttgattggacaaatttgtccaaacgggatgcatcaaatgaaatatgtgccatatttgtcttattcctcctgtttttaaacacaagtatacgttaataactttagcttttttagcgctaaaaagcaagccagatcgaccgctttttcagactagaccacctttattttcaaaagaaaattactcaaagtccttgacttgtttcacccatcccgctatacttcaaatcatcaaataaaacggaggttactgaaaatgacaaacactcacttagtacaattgaatattcgttggcaaagccgctaagtgagattgtatgccgttatggatacagtcttttgattgtatccatgcggccattcatcagtaatcgattgaattttaagcctacatggattttaactcgaggaaatccatgtaggctttttctgtcccctacatgactgtcatgtgggggacttttttgtttgataataatgagtgcgttcaaaccgggtatatttcgaacactagcctagtggtgcgaatgaacgacgcagtcggtcgtttgtgcgacgtagctaggcacaggaatacggtttgaaaagcacgttaaaaaatagaagtgcgtttgaaacggtttgactctgagcattaacctaatttaccaaattggtgatgtaatcaccagtttagtaaatgtagttaagcacaagagtcagtttcaaaaagcacgttaaaggagctttcgccatgtctaaactcaaacgttttttacccctcattctaatttttgggagtttgctcaccctacttggtatcaaaaaaatcaaagaagccaaccaacctaaattgccaattgtcgggatttcacaacccttatctcatcccgcacttgatgaaattcatcgcgggattgtcgctggtctggcaagcgaaggctatcataacaaccgtaatatcaaaattgattttcaaaatgcgcagaacgatcaaagtaatttacgtctgatgagcaatcaattcgtcactgaaaaagccaaagtaacggtcggcattgccacccctgccgcccaaagcttagccaatgctactaagcaattaccgattatcttaggcgccgtgactgatccggcgagtgccaatctcgttaagaacaacgcccatcctggtgccaatatcaccggcgtatccgatcaagccccgattcgaaagcaattggcattaatgcaaaccatcatgccgcaactgaaaaccgtcggcattctctattcaagcagtgataactctgccaccagtcaaatgcacttattcaaacaacttgctgaacaaaaagggctgaccgttgttgaggccagtcttagttcagtcaacgatctggaacaagtcagccagaatctagtcccaaaagtcgatgcaatttacgttcccaccgataatacgattgctagtgcaatgggcaccctcgtccatgtgaccgacaaaaccaaaacgccagtctttccatccgctgaaacgatggttaaagatggcgggctcgcaaccgtcggcctaagccaatacgacttaggcgttgaaaccggtaagatgaccgccgccgttttaagtggtcgttcaaaacccgcaaccactccaattcggtatttacgcaaaggacatttagtcttaaacctcaaaaaagcaaaagccctccacatcacaattccgcagagtttaatgcaaatcgctaatcaaaaaggagctgttctcaaatgaatcttattatctcaaccattgaccaaggattattatggagcctactaagcctaggcgttttcatcacctttcgaatcttaaaattccctgacatgaccgttgaaggcagtttcccgttaggtgcagccctcagcgctttaatgttgcaacaacataacattgccttttccttattagtcgcattcatcggtggctgtttagccggactcgtgacggcaattttatacaactacttccatgtccagagtttgttagccgggattttaacgctaaccggtttgtattccgtcaacttgcggattttaggccaagccaacatggcaattggtgatcaacacaacctatatcaactgccgctattccatcaattaacgctcgatcaacggctcttagtcattaacctagtcatcatgctgatcgccctattattactggctggcttactctacaccgaattcggtcaatccctgattgcagctggtgataatcccacgatggccctctcacaagggattgccgtaaagcggacgaaaatgattgggatcgtgctgtcaaacggcttgatcgcccttgcaggtgggctcgttgcacaatatagcggctttgctgatgtcaacatgggcatcggtgtgatggtcattgggttatccgcgatcatcattggtgaacggctccttgtcggcaagcatttcatcgccaaactaattagcattatcctaggaagcgtcgtctaccgcctcatcttactccttgtcttacaactcggctttaacgccaatgatttcaaactcttctcggccgtcattttggccatcttcatcatcgcaccacaacaaaagaaaggactgactaccaaatgaccccgcgtatgactttaaaccacctcaattttgaagttactgataataatgaacccaaacaactcttaaatgatttaaatctcacgattaatcctggtgaatttgtcgtcctccttggcgcaaacggtgcgggtaaatcgactttttttaataccattgcgggtgatttaacccccacaagtgggcaactactattcaacgaccacgacattacgaagcaatccgcccaacaacgcacacggctcattagtcgtgtctaccaagatcctaagttgggcaccgcagctgatatgaccgttgccgaaaatattttgttggcgatgcgccgtggccaacgccgccgcttatttccccggcgtctcaagcaacaactcccacaaatcaaagcgctcgccaagacactcccgaatcacttggatcaacaactcaatcgcccggttagtaacttgtcgggtggccaacgacaaacgttaaacttcttgatggcgacgattcaaaaacctgaattgctgttattagatgaacacacatctgctttagatgcagtttccagccaagcattgatgacttttaccaatcaaacaattcgcgataaccaactcacctgcctaatgattacgcatgatttagaggatgcgttgcaatatggcaatcgactcttggtgttaaaagccggtaaactgattgccgacttgaacgcgactgaaaagcaagcattaactgtcgatactttactagactatttaaactaatcaaaccgcgctaaccattttcggatagcgcggtttttgctgcttaaatccattcaatcttatcaagcaccaatttatcagcggttaattaattaaggatatgattaacctacgtttaacacttgtaatcgttttctaagtatgctaaattattcccataaggttgtgcgcaacctaattattgatttaagggagatctgtataatgacagttactactcaaaaaactattccagctagtgttgctatgcttagagttatcgaatcttggggcgttgatcatatctttggttaccctggtggctcatttaactcaacaatgaatgctcttaatattgaaaaggatcgtttaaaatatattcaaattcgtcacgaacaagttggggcccttgccgcagctgctgacgctaaattaactggtaaaatcggggttgcttttggttcagctggccctggtgcaactaaccttttaactggtttatatgatgcaaaagaagatcatgcaccagttttagccttgattggtcaagtaccaagcaagaacatgaactacaactacttccaagaattcgctgaaaacccaatgttctctgacgttgctgtttataaccgcctcgttatgacacctgaaagcttgccatacgttgttgataaagcaatccgtgaagcttacaaacacaatggcgtcgcagtggttgttattccaaatgacttcggctacgttgaaattccagatacaccatatagctcaagctcaccttcagatcgtaaaaaagtggctggtccagtcgcaacagacgaagaagttgatcaattcttagcaatggttaaagacgctaaacgccctgtaattcacgttggtcgtgggattaaagacggcggcgataagctcgttgaattatcaaagaaacttcaaattccaatcgtcatgactgggcttgctaaagggttagtgcctgatagttatgaaggtaacttaggcatggctaaccgggctgcttctaaagcggctgatgaaatcatggccgttagtgatcttgtgattgccatcggtgctgacttcccatttgccaacttaatttatcggacacatgacttcaagtttatccaaatcgataacgatgaagcacaatttggccgtcaccatttcttagacttcgggatctggtcagatgcaactgcttttgttgaaaaagtaatcgccagaagtgaaacggttgccccaacaccattcttcaaagctgctgttgctgatatggcaaactggcaagcctatcttgatgttttaacgaaccgcgactctgatccgcttgaattcgaaccaatctacaaagaaatcaaccggattgctgaagacgatgctgtcttttcaatcgatgttggtgataatatcatcaacagtttccgtcacttgaacttaacgcctaagaacaaatgggtgatttctgccctctttgcttcaatgggttcaggcgttcctggtgccttagctggtcaattgagctacccagatcgccaagtcttcaacatctcgggtgatggtgccttttcaatggtcatgcaagacttgatcactgaaaagaaataccaattaccaatcattaatatcatcacatcaaatgccgcattaaacttcatcaagagtgaacaagatgatattccaatggattactcaggaatcttcattgaagatcaagattttgccatgattgcgcaagcaatgggcattgaatcaatcaccgttcgttcttctaaagaattacccgctgcctttgacaaagcccttgaagtcacaaaagctggccgaccattcttaattgatgctaagatcactgacaaacggagtattccagttgaagaattagaactaaccattaaagatggtaagttaacagaaacaattagcgcaagctatgatgcttctcgtcctgctggcaaagaatacagcgtggctgatttcttcgcagaatacgatggtcaatcactgaagacattaccagaattatttgaagaaaacggtgttgaactataaaacaacccggccatcataaaaatagcgtctcaacacattgcggtgtgttgggacgctatttttattgatttaatttttggtaatggcttctttaggatggaaccaaacgacgttcttgtcgaagaatgagactaagtcgtttgataagtacaagatataggtgaagaataagacccaatttgagccaccctgcattgctgtaatgccccacaacgtgattgatacgatactttggatgaaccagaagtaatagctttctttaaaccgtaatgtggtcaacagtgcgccagtaaacccaactgaagcggcgatactatcgatcaatggtcgtggactgtccgtcatattgctttcccagagatataataacccaactgatacaacaaagaacaatagcgtcaacgcccaattacgaagtcctttaccacgagtagcaagcccccggacttttttatcaacgttttgcgcccaatctggcattaataagactgggatgtctaacataataatgtagacggtttgtaataccatatcgttatagtttttagcattataagccacaataatgtagattaatgcagagatgacaccaaagacaccgtttaaaggtttcgtattcgtaatactaatagtacaggtgaagcctaacatccccgcgagcatcgttaaaaacgacacgccagtcattggaccaccggaaatagtagcagctaaaataaagcctaacccaaacatcaacaaaccataactggatgttgtccaccctttcatctgttgaatgtaccacttaggattaaatacactggtgattgcacgattgtcctgcattgaactgaacccctctttatatgaatttaattatcactccagattgtcaacaccattttccatatattgatgtgccatctgacgaaacaacactatatatggtacacgctaagcattctaatttaaactcttgtatttaattcaatttgtggtagctaattttaaagcctttttgaaagtgccgttaacttacgattgcaagcgctgaactagaccattcgaaaatattttttatttttagcgttcgttgtcaagactcaattcaatctttgaccaatggcttaatagtctctttgatcaattgaccggagaatgacttcattaatgcccacattatctggtgtatcgatggcgttcattacggcattagcgacatcggttgctgttaatccagtttcagtttcactcttgagaacagctgctcgtaattgcggatcactaatccggctggctaattcggtttgcgcatgtcctggagagattaacgttgatttaatgcccattccaacttcttccacacgtaacccttccatcaccgcgcgcattgcatatttagtggctgaataaacggataagccttcaccagtgaaatgaccggcaactgaatccgtggtaatgatatgaccactcttttgctgttccattaaaggtaaggcatatttaatgccatatagcgcacctttgatattaatatcaatcatagcctcccactcatcgactttaccatcgcgtagcattgagacgggcattaagccagcattattgaatagcacatcaattctaccaaatttagcgattgtcaattcgattaaggcttgcatgtctgctaattgcgtcacatccgtttgctgataaataacctcagtgtcgtattgagcggttaacgccgccaacgcacttgttcgtcgagccgctaaaacaagttttgcacctttggctgctaataaggtggccgtctctttaccaatcccacttgatgcaccggtaatcacaacgactttattttgaatatcattcatttcttttcccctcactttttagttgataaggttagtatatcgggtacttcgcaataaacaattacgcactttcaactaactaacgcacctcaaagtaagttttgtgaaatcactaaaaagacgacaacattctttttgaataaatgttatcgccttctttaaatatcgtatttctcatggtctcgataatccaactgcacatcatcaccattgctctgtaaaaagtcgattctatcttcgccccacttggccatcattcctaggacggaaaccaatgatttgccgtacgcagaaatcgcatactccacgtgtgggggttcgttagaaacttttcgagtaatgatgccatctcgttccaattcacgtaattgatcggttaaaactttggctgaaattccctgaacgactcttttaagttcggccggtctttgaggtcctgccacaagatgacagagaatcaacggtttccatttcattccaatcactgataaagtcattaaaacaccgttggtataatttttttgtggctcgttcaaggcctttcctccacttcttgatgctgatttgtttgtctatcataccatcaaaaaaaggatcaggacaatcttatctgtcctaatccctgattaattattctggtcgataagccgctttagcagcgttcatcgccgaccatgccttaggccagccgatataaaatgataaatgcgtaatcacttcgacaatttcagcttcagtaatgccgttttccttatcaatctttaaatgcgctggtaattgttcaaaattaccacctgaaatcaaggcactgatggtgattaaactccgttgatgtgctggtaactctgattcacgcgaccaaacttgcccgaataaaacatcgtcgtttaattcagcgaatttaggtgcaaaatcacccaatagatcgcggcctgctgtttgtttctttgccattttaaaaacccctttctgaattaaagtgcgtcataaagcgcatttgaaacagcttctaaccattctggtgtgccggcagtgatggcgacatgactaaaccagctatccttaatggccccatgccagtgtttgatgccgtctttagtaacaatcacatctcctgggactaagtgttgtgctgctttaccttcttcttgataccagccttcgccaccagtcaccaatagaatttggtacccagcatgatggatgtgccaattgttccgacaaccaggttcaaacgtgacattcccgacaccgacattcacgtctggttcgttcactaacattgataaataactttgaccgacgaagaagtcttgataagccacattagcttctccaactgggaataattgtttttcttttaattgttcattcttaaccattctaataacctcactttattaggattcaaatcgttgtaaatacgtttcaaaactctctgcttgatcgatactctgatccaatttaccatcataccaatcaattttacgcgttaggatctgtaaatttgcttggcgctcagccaattcggcttcagcttgagcctttgttttttgcaataaagctttgcgcgcttcaatcgtcgcgtctccttgagcccgcaatgcaacatattgctttaattctgtaatccgcataccggtcccttttagatggagtataaacccgacccacttaacgtcctctaatgtataaaagcggacaccggccgcatcgcgttgcggcataatcaagccttggtcttcatagtaacgtaatgtgtaagtcgacaaaccaaccaatttagcaaactcgccgattttgtactgctcttgtgccatcgacatccctcctacaaaaatagcttataccttagagtatactataaggcaagttttttaataaataggacgatcgccatcaatattcggctgattaatgccccaacttgccccaattcctttttcaggatgattaactaaatcaacaacaacttgcgcgatactccgtcgtgaaataatcgtccctttaaacggtgttcccttttcagttaattcgtaatcgatccgatcttcattggtcatataggcacaacgtaaaatggtatagttaagcgaagattgttcaacaatcttcgccgcccgccgcacttcatgaccgactgcttgttcattccactcaccaaaagcacctggcacttcatgatacaagcctaatccactgatatagattaatcgtttgatgcccgctgcagtcattgtcgcgacaacgttttgcattaatggttcgaactgcccgcctaaatttgcgtaaacgatatcgaccccagctaaactgtctgccaacagctcttgatccaacacatcaccttcaataaccgtgacatgtggattttgtgctaatgcgcttagccgttcagcgtgccgtaaatatagcacgagctcatgttgattttctttcaacagttgctcaataactaactgggccacttgtccggctgcccctaatactaaaatgcgactcattttaatcaccccttcttcaatgtctttagcatattccttaaagtacactcgaaggcaagccatttttcaaatttaattggtctaggttgctacttgactttcaaattaaattgactaaaatgaaagttgttattaattataatcattataaagtaataaaaagtattggaggcttcaccttgtcaaaaaaattatcactcgcccaaaaaattaacgtgatgcgggctagcgtcatgggtgccaatgatgggattttatccgtcgccggaattgttatcggtgttgccggcgctacaagcaatagcttcgccatcttcatttcgggaattgccggaatgattgctggaacgatctcaatggcgatgggcgaatacgtctctgtcagcacgcaaaaagacgcacaggaaatggcaatcattaatacgaaattgaatttaaacagtaattatgcgtctcagatggcttttgttcggcaaaaatacgtcaacactgggattgatcctgaacttgccgatcgggctacacacgaaatgatgactgctgatccgttgacgactgtcgtacgtgaaaaatatgggtttgtcccgactgcttttaccagtccttacgcagccgctgttgcgtcattcatctcatttccaatcggttctattttgccactagccgcaatcaccttattaccccaaaccattcgcgtgcaagccaccatcattgcagtgatgattgcccttgcgctaaccggctacagtgcagccgctctcggcaaagcgaatcgttcaaaagccatgttgcgcaatgtgctttccggattattaaccatggtagtcacttacgctattgggacattattcaaacaataatcgcttagaaaggatttttttatgacccctcttaaagccccactcaaaacaactgaaaaaccccatcaaacgatggaagaaaagatgaatacccttcgagccggcgttctaggttctaatgacgggattctaaccgttgtcggtgtgctctttagtgttgccgccgcaacaaccaataatttcaccatttttatcgctggacttgctgatttattagcctgtgctttttcaatggcggcgggtgaatatgcttcagttagttcgcaaagtgacacggaaaaagccgctgttgccattgaacaagcacgcttaaaaacagctaaagatgatcaaattaaagaagtccaagctttttacgaagccaaaggtgtcacttctgaaacggcactcgcaatcgctaaggacttaatgcataagaagcctttagcaacaattgttaatgttaaatatgacctagagcttggccattatatgaacccgtgggccgcagcgtttgcatccctcttctcagccgctttcggtggcgtcttcccccttgtgacaatgattctactgcctgaagcctacaagatgaccggcacaatcattgccgtcaccatcgcggtttccattaccgcgtttatcagcgctaaactgggcgatggcaaagtcaaagtctccattattcggaacatcctaattggtttaattacaatggccattcactacgggattggccaactcttctaaagaaatccgtcatcatttgttctaatctaacttaaattcagccacaaaaaaaggcgtcgagcttaaattaacttttagctcgatgcctttttgcttatctaattttagttctcaagaactgggcaattttttcatggccagcatcattgggatggagactgtctaaactcagctcagccgcttgttgtgcatccgcaaatgacaacgctgattcgttaaacaaactgatatgctgaacgccaaacaagtccgtcacttgcgcaatcgcttgttcataattttgttgctgataaccgccttgattgacggccgaaaagaagtcagtcccaatgtgaacgtgcgagataaaataaaccgtcgcttgtgggtaacgtttcgtaatctgcccaagtaatttttgtagtgcgccgtagaatgttactgtggactgatcaccaaattgaccaagtggtacatcacgaccaaagtcattcacacccgcataaatcaataataaatccgttgattcaggaatggcttgccagcgttcaaccatcggatcatacggttgggcaatcgtcgaccccgaaattccgagattggtgattgtgggaattgtgagccattctgctaaccactggtagtaccatttgtgtgcgtaatgattacgttgatccgtgatgctatcaccaagtaccgttaaatgttgatattgtgtcatttgctacttcgctcctaattctgagtaatccgtcagttgccaactaaattgatcccaataattggtttgctttaatgttttaagcgcattgaattcggctagccgattcgtcgtcagacgactcttatgccgtaactctgccgataaatacccaatatggcttaagatcaccggcgtacctaccaaatttttctgcgtcagttgccgtttgatttcctgtggcgttaaatacggtgtttgttgcgccgttatcaacgtcccagtcgttaaaacggcatattccgacattaatagcaggtaggccgcttgttctgtcggtcttaaatgcgccgtttcattgcgaacagggacatgatacgtttgcgctagttctagaacaattgcatagatttcaggcgttaacgttgccacaaaatggtgcgatgtcaaatgcgtgagttgtaacccactctccaaaaagcggtcaatctgcgcttgaaactcacgcttaacatcagtaatggccaactgttttggatgagtttgtaaggtttgataagcatgacaaaacccagccggggttaccaagctgggaatcgtcagtggctgactaattgggcggtctttgtcgaggaccaagtgcaatcccattgccataatcccatgttgctgggcgagtgccgcactcatttcaaaatgaggcgatgtcacttgcgcattagtggtagaaatcacgccagtttttaagccagttatgattgcgcgcgaaatcggtatggtcatcccgaaatcatcagattcaataatgattggttgcatcttaacccacctattctgccgctaagtcgaactgtccaataatggtgtcagtcgtaactgttgttggtagtggctctgctggtgcaaaggtggcgttgctgctgacgaccatgatagtcgttgccttttgggcggctgctagttgttgccagtcaatatcaacaatcgcttcgccagctttgacacgatcacccgcttcaacgtgcatcgtaaatggcgcgcccttcaattcaacggtatcaatccccatatgaatcagaatctcaacattttgttttgttgtaatcatgatggcgtgtttagtggggaaaatcgaactaacaacaccatcaattggtgcgctaatcgttgtttgccgttcatcaggggtaatggcaaagccatcgccaactgccttgcttgcaaatacttcatcggtaacttgttcaattggtaaataactgccagcaacgggggctgttacctgtccaactggtccttttttcaaaaaattaaacatcgttcttcctcttttcttaaacccgcatcatgatagcttcataaggtcgtaaagtgatttgctgaccatcaaactgcggttgttcgtaattatccatgagcacgtccttgacgtgtggtattgaacggacttgtgtttgaccagtaaaattagccatcacgcgaatcgtttcagtatctaggtgtcgttgataagtgtaaaccgcttcgtcctctggttcaaataattggtagtccccttcaattaaaactggcataagcttacgcattcgcactaattcttgatagaatgcaaagacactattgggttcatgaatcttagcggcaactgagtaatcatcgtgctcaaccggcattaaccatggtgtcccagtcgtaaacccgtgatgcgccgtttgatcccattgcatcggaattcgacagttctcgcgtgatttctgctgtaaaatcttaatcgctaacgcttcatcaatcccatcgcttagcatttgatggtaagcattgatggattcagcgtcttgatattggtcaatggcggtgaagttcgcgttcttcatcgcaatttcttccccttgataaatatacggtgtgccttgtaagccaaattcgactaatgctaataatttagcggattgatcgcggtattgaccgtcatccaagaagcgcgaaacggcacgcggctgatcatgatttgaccagaataatgcgttccaaccaccaccggcagccatccccgtttgccaatcactaagcacccgttttagatcagacagccgataatcgcctagtgtccattttttgccaccggtataatcaaccttcacatgatggaaggtaaacgccatcgataactcttcacgggctggattggtataacgaatcgcttcatcaattggggttgaggaaagttccccaaccgtgacaaattggttcgggccaaagaccttttcgtacatttcatgaatgtattcgtgcacatgtggtccattcgtatagaaattgcgcccatcatcgcttggcgttttaaacgtatcattcgggaagtctttatccttcgagatattgttaattacgtctaaccgtagcccatcaatcccaaggtctgcccagaattgcatcattttaaaaatctcggcccgcaagtgttcattccgccagttcaaatctggcatgctcttttcgtataggtgaagataatattgatcaagtgctggcacatattcccaagcactgccactaaacttggataaccaattatttggttcgtgtccatctactggatcacgccacaaataataatcatggtacggattatccttgcctttaagactctcttggaaccagcggtgttgatcagaagtatggttgaccaccatatccatcatgattttaatcccacgtttatgggcttcatttaagagtcgttcaaaatcggttaaatcaccaaaaatgggatcaatgtggtaatagtccgcaatatcataaccgttatcacgaccgggggaaacatacattggcgtcaaccaaatcaattcaatcccaagattttgtaaataatctaaccgttgaataatgccgttgatatccccgattccgtcaccgttggcatcttgaaagctccgcggataaatttgataaactgttgctttttgccaccatgccatacgatatctctcctatttcagtcgtttattttgctgttcctggtttttgtggtttagccattgcttcaccagctgtcatttgatcgttataaccccaaacgagcgttacaataaatggcacaatcgttgcaaccgctgatgatgcaatgaaaatccataagtttgataaatctgctgggtgttttggatctaagaatgatgcaaagccgatccacgaccccgcgaaaccgaacatattaccatggaataacccactgacaaatccgccagcggctgaaccaattaaaccggcaatgaagacgcgtcggaacttcaagttgaccccataaatagcaggttctgtaaccccacagaatgctgaaatcgcaccagcaaatgataattcttttaaagctgttttacgggtcttaatcgcaacagctaaaacagcggccccttgtgcaatcatcgttgtgcttaaaatcgcgttcaagtaactgtgacccgttgcggcaacatcgttggcaataattggtaagatcccccagtgtaatccgaagataacaagcacttgatagaatccaccgattaataacccagataaccaaccactctttaataataagaattgaatcccgaatgctaaaccatttgataaccaaataatagcaggccctgtgatgtaaagcgtaatggcagaaacgactgcaatcacaatcaatggtgtaaagataatttgtaagtagcctggtaaccagcccttaacccatttggttaatttagcgaccaaccaagccgcgagaatcattggaaaaatcgaatacgtgtagttaaccattgggaagtttaatgacccaatttcaagtaaagatttcccgtttaaagccactaatgaaggatgcaccagaacaccaccgataacagcggttaaaactggatcacccttcaatttcttagcggcagtgaacccaactaacatgggcaagaagtagaaaacagaatcacccatcgcacttaagacgatgtatgcttcactcttagcacttaatagcgccccaagttgtggcatcgttagcattgccaagacaccttttaaaatcccaccagcagctaagataccgacaatcggactcatcgcaccggtaatcacgccgattaattgattaaaggcttctttaacatggccccatggcgttaaattttgttggcgcgttgttgcagccacaacttgggccgtttcatcttcgtcagcaaactctgtcccgatttctgcaatcacggcatcataaacggcagtgacttggttgccaatgaccacttggtattgcccagaggccttttgaacgttaatgaccccatctaatgctttaatttcttcggtcttcgcttttgattcgtcctttagataaaaacgaagccgtgtaatacagtgaattaaactatcgatattttctttgcccccgacaccggcgacaattgcctgtgcgagttgtgaataatccttttgagccataataattcctcccgaatcttattgaattaaaagtagcatgaataaaagcgctttcttagtacaccgtaatcatatatcatgtacgtacaagttgtcaaacctttttaaaaccgttttcttgttagcgcttaatctaaccttgcaacttcaccgaatccccgttatgataggaatgagaaaacaaattggagaatatcgaatggctaaaaaatatgaaatgatttatcgagatctcgtgcgcaagattacgcaccaactctatcaaagcggcactttcttaccaagtgaaaatgaactcactgaactctacggtgcctcgcgtgaaaccgtccgtaaagcattaggtagtctacttgaaaatggctttatccataaaattaaagggaaaggctctttggttctcggtctagacaagtatgcttttccgatttcgggattgaccagttatcgtgaattagatagtcttttcgatatgcatactgacactcaagtcttgcaattaacacagacgaccgttccccaaacccttttccatcttgaatctgaagagcagttacctgccacttacattcaacggctgcgcgtcgttaacggtcagcccctggtaatcgataatgactacgtcttaactagcatagtcccccacatttcaaaaggggttgcacaagactcactctatcgttactttgaagaaacactcaaactcgaaattgggtatggcagtaaggagttcacggtgattcccgccactgaagaacagtgtcagatactgaacctaccgcctaacagctccgtagtcagtgttaaaggtgtcacccatctacaagataataccctccttcaattcaccgaatcgattcaccgtgccgataagtttaaatttatcgaacatgctcggcgtaaaattatctagtcaaaaaaaacgacacccaccggctgagagttgccagatgggtgtcttttttttatttgaccgcctgtgttttaaaaacagcgatttgatttaaaagttcactaatgcgtgttcgatcactcttttgttgttgacggctcgttgtgagtttctgatataagtttaactcatcaccctcgttgaaggcggtgaccatggcttcagcggacgagacgtaatcagtcattactaattgtaactgacggttaatttctcgtaattcttttggcggatttagtaatgtgacttgatcaataaattgtttaaaaacccgtaagttacgttgaaaatattcgtttaacgattccaaattttcgcccaccagacagcgccctttgatgatgttcttgctggtccgggtgtactcactaaatactgtttcaaacacgataaaccgttctaaaaattgattccaccgtacgatgtattcctgagtcgatagttgatccgctttgacactcatggtcgttccccctttaatataatatctaaatgcctatcatgagtataaatatatactaaatacagataaaaggctaattattagcctttgttaccgataacgatttcaaattgcgtttcattttacaaataaaacatgacgtcctatagttaaggcaagccaaaaaaaggatctgattacttgtccaaccaacgttatctatctggaacagcactaaaactatttatattcaccctactagccggcacgttcacaatgtctatcagccaatctgccctttcaactgcttatccaactttaatggcctattttgatttatcagccacaactgttcaatggctgacaaccggttttatgctcgtaatgtgtgtcatgatgccgattagtccttggttattaaacaacatcccattcaaacgactctacatggggattttaagtttatttactattggaacgctattaattgtcttcgctaatcagttcggttgggtattgttcgggcgggcgttggaagccatcgcagtaggtgttttatttccatcgtttcaaactgtcttattaaccattactgctgaaaatcaacggggccaaattatgggcctggctggtttagtaatgggctctgcactagcttgtgggccgattatttcagggattattctcaactacttcagctggcgaggactattcatcgcctttattctgattatcttaaccgtgttagcaacagctaacttcactatttctgatgttatgccggctaagccctatcaccttgatggtctttccgttttatgtacaactggattaatcggtttattatatgtcatcagtagcgctaatcatcccactatcaacccaatcgggctctggggtatcggattagtgagctgcctagcactgggttattttgtctaccggcaactcacccagacaacgccacttcttaatttacatattctcagttaccttaactacgatattgcggtcggattgactgctatttcctatatttcattgattgtcaccacagtcatctacccattatattttcaagctcaattgaagttgacgccgcttctttcaggattagcattggtccctgctgccgttgtgttaagccttttgaatccactcgcgggccggttagctgataaaattggctttaaaccgaccttactcgttggcctaaccatgattagcattggatggctagctttgattggcttctaccaatggctgtcattaccattgatgatcctgtgtgcctgtttcatcgaaggcggcaacgcatttgtcatgatgcctgctgttacacttggtgctaatagcctgccggatcaagtgctcgctgacggcactgccgtcacaaccacgattcgtcaaattgcgggcgcgctgggcgtcacccttgcaactctccttttaagtgtcgccggttaccaagtcgtatttattagtttgctcggcctgaccttaattggtcttggcttagccactcaactacaccccaaataagccacaataaaaagcagattagcgatgatgattgtcatcgttaacctgcttttttaataccagcgttgcttaattaagataagtccccatgtcattaaactaaatgttgaaatgatcgcgccgataattagtcccggcgcacgatagactaagcgaacttggttagtccctttctcaagtggcactgcaagcatattgcccatgactcgtcgtgtacgaactttttgatgattgacttgcgcatgccaaccactgtcatatggcacacttagataaagtaattgatcagcggtcttagctggtactacaccagcaatccgaccattatctgccgacagttgttttaggtcgatctttaagcgttgttgtgccaactgatcaaaagcttgatcgaaatgagcctggtttaaactagccacctgaatcttacgaaaggctttaggttgccgactggtaattgtcagcgttagttgttgccctttttgatagcgacccaaaccaataatcgtggtcccattcaattcaatcggtactttatgtgttcggccattaattttcactttcagctttgataagttttgttgcggcaagtatagataagcatatccacttgtcttaacttgcgttgtaaacgtaatttgccgacgtttttgcgcttgtaaatctaattgattatattgataaaatggtgtcgtttgtcctgtcatcgcttgcataattcgatcttgattttcaaacggttcatgtgctttcaaagccacgtgtgctagctggtcattaaccgcaaaccctaagcctaacgttttatggggttgtgtcacaacctgtccttgcttagcaattaggtcatattgattggcaaatagtaggtcagtcagcacagtatgcccaatcccgttaatccgccgggcattcttactataaaaaccgagattaaccaacatcgtccgcatccgctcatcaagtgtcgaagaataattgtttaatgtatactgtccaaaggtcaacgcatcattgtacccataatacggttccttaaacgctttttttaagagaatcgcttggttattaacgcgatagaaatcaggtgtttgccgttcaagctgttcaaagagtgctgcttggcgttggtattgttgcgcataaacaacttgatcgcccatcggtaacttagtggtcgtcaagcggccattaatcaccagttcactaaacgtcaatacggctcccagaccaatcacccatggttgccaacgtgctcctttttgccacgctgcaaaaataacgctagccaaaaccattagtccgattaacaaccagagcgattgtttctgcacaccacgtacatgtggcccatagtagagcgccaactggccaatgctgagcaagccaccgactatcaaaataaccaggcgtttcgtttgacgtttaccgattggttcaatacttgcttcataggcaattttgatgagaacaaatgccatcaaataggtattccgatatggaaacccttctggttgctggaacatgtgccacatcgtattaaatgtcgttacccagaaacttaacgctaaactaacaattaaaaagccgttcgaccactttgcttgccgtcgaatggttggtagacagaaataatagaccgcaaataacagcgctaatgtactgataaataaagttggttcatgaattaagcgttgcgtataatggctgccgccgacttgaaattggctcaaaacttcccagccaaactgcggggttggataaaaactggttgcagcgattgtctttttcccagtcttcaacattccaagtaacgacggcaataatacaactgctgttgtgccccccgcaatcaatgaggcccaacaaaactgccagatagcctgccgccagtgaaccactagttgccaccaagactgttggggttgtttccatttgattaacaaactaattgcatacaaaacggcaaatagacatgacatataacccaagtaatagttggtaaagatagtggcaaccaacatccagatatataagccaggacgcccttttaaaaatagccgttctaatcctaagatgaccagtgggaggaaaatcagagcgtctaaccacattaggttataaaagttcattgccacaaagccacttaaactataagctgttgcaaaaattagcgcggaaaaatgatattcaggctgacgcgtctttagaaaatgggccatcgttaaacccattgccccaatcttcaaaataatgacatacccaaccaccactggcaactggctattcgaccaaaataggagcagtaaattaaaaggactgattaaataataagccgctagcggtaatatatcgccacccagtgaaagcgaaaatgaatacgtactgaaattcatctgggccatttgccgtttaaactctgccaaaaagggcatatattgggtaccgagatcactaatcaataaattatgccgtccaaatggcactatttggagcattgcatatagccccaccattaataacatgggaactagcacactcaataaatagtaactgacagctgttttatttgttctcttcatctgactcacttcttttgccttttttatagaataatacacactctaaacaaaataagccacccagacaatttgtctaggtgacttattagtaagttgcttacttcatcataccgagggtgaccccaccgacaatgactaataaacagccaagtgtgacgtaaaccatttcttttttcgttttttgttcacccaataggtaaatactaccgattgttgagatgataatgccacattgtgataatgaatagctaattgctagaccaatatcattcattgaaatcaacataaataagttcccaagaccccataataaaccagtactaatgttgagtgctgttttcttattgaagaccgctgtcccaatgccaacaccggcaaagattgcagcaccgacgaacattccaattgcttgtggtaaaacaattgatgttgcgccaatgtgtgaccagttaacgatgattgtgtaaccaccataaccgattgttgataagattaatgctctaaaaccacgtgcaaattgtgtatcttctttagcagcaacactgctcttcggatccttcattgaagttaacgtggcaccagcgattaagatcactaatgcagtaatcccgaagatgtaatcgtgcgttgtcttccattcatggaataacaaagcacctgctaaagtgtttacaatcaattgcatcccggttgataatgggactgtcttagaaacacccatcgcttgcattgattggaactgttgtccttgaccaatgctccagaataaaccggaaatgataccgattaccataatccgtaagtttaaagcgggttgtaatactaaaaaggtaccgattccaaaaaccagcgcaccaattgtcattcctaaggtttgttgataggcattcccgccaagtttgccactcactaacccgatactaccccatgcaagtgcagggattaatgcaattaaaatagccatttataaattcctcttcttctctaaagtacaagaatccattatacatagttttatatccgctggctagtaggaaaacggcaccattcaatcgttactagccttcactaccgttatgtaagcaactgtcccagtcgtgattgcgcttacgtaaattttacgtaaaaaagcgttttttttagtaaaaaaaatcaacgataagcgttttcttaccgttgatagccttaatgttttcgctttgcatgttgtaggacttgatataacaggacgccaatcatcacccctaatgtattaaacatgagatcatcaatatctgccatgccagttcctaaaacaaactgggcggattcaatacacagggataacagagccccttcaataatcgtaatcaaccgatcccctttgcgctgtgtcaatgaccgtcgcaataaaccaaacgggataaaccacgcaatgttcccgtagaagttataccaataatcaatctgggcgggcgcttgccgtaacttgaaagtctcaacaaacggtgtcaaattaatttggctaagtggtcgttgcaaatggaactgcatttgccacggataataaatatgccgtaaaaccgttaacgagaccaataaggcaatataaaacacaaataacaatagtttcagttctgggagaagctgtattttgcgtcgtttcattaataagtaccccaaccggcacacaataaaaaccaaacaatacaaaatcgtcttatctaaactctccaccgtcaatttgatgagtggtaaatgattatactgttccccccaagggaggatccattgttcataaatacgcccaagaaataccaaaaaaccaacctcacttattccactaatttaacctatctgttcattattcaatgagtaattaagtccattatagctgttttttttcaataaataacgcttaattactcgactaaagtgaatcttaaactattaggtatcgactgcccaactttagcccgatgtgtgcctactgtgctatgctataatagaaattactataacttgaaacaggagccttttatgaaagttctattatattttgaaagtgaaaaattactcgctaaatctggaattgggcgggcgttggatcatcaaaaacgcgcgttaaccgaaatggggattgactatacgcttgatccgaatgatcaagattacgatatcttacatatcaatacatacggactcaaaagccgcagtgtcatcaaaaaggcgcgtaaaatggggaaacccgtcatttatcatgcacattcgaccgaagaagattttcgcaactcctttgttggttccaatcaactcgctccatttgttaaacggtacctcgttagcctctatcaacaagccgaccacttaatcacccccaccccttattcaaaatcattattggaaagctatggtctaaccaaccctatcgctcccatttcaaacggcattgatttagccaagtatcaagccacaccagctaaagaagccgcttttcggaatttcttccatttaaagcctgatcaaaaagtgattatctgcgtcggcctcttctttaaacgcaaagggcttctcgattttgtcgaaatcgccaaaggtctacccgaatacacctttatctggtttggagatgtacccatgtacagtattccagcaaatattcgccggattgtcaaacaggatcatcccgacaacgtcatcttccctggttatatcaaaggcgatattatcgaaggcgcgtatgccaatgctgacttatttttcttcccttcttatgaagagactgaagggattgtcgtcttagaagcccttgcaagtcatcaaaaagtgttggtgcgcgatattccggtttaccatggctggcttgccgatcaacaaaactgctacatgggtcacactaacgcagaattcagtcaactcatccaagcgatggtcactaatgccgttcccgatttaacagctcaaggctaccaaactgcgcagtctaagagtattacagaaatcggccatgaattacaagccgtttatcaacatgttttggcgccagatcaactgaatccaaagtacgatgccatcatgcggcccgcgaaacgttaagtttctgtttaaactttaaactgctatttgcgctaatgccgccctcgggttaaaataaggcattagcgctcttttagttctgttttttgaaaggatgtcacattatttgaaactcacaaaaattaaatcattcctatccacgagattaggcttcatgagtttgttagtctttttattttggctaaaaacgttattcgggtacttcaccgattttaacctcgcagctagtggcttcttacaaattgctattttaatctttaatccggtcgcgacgacgctccttttattcggcatcattctttatgttcgccagccgcatctcagttattggttgggcttgattatctatgccgccaacaccgctcttttatattttaatgtcatctattaccggcaattcaccgattacatgaccatcaacaccatcttagggtattcaaaagtttcggctgggctcagcaaaagttcactggccctcatgaactggcatgatgcgctgtattggattgatattattgtcttagccttgctgattttaaccaaggtcatcaagatcgacaaacacgcatttaatcggtggtgggccttcagtattacctcactggccgtcttattatttggcatcaaccttggcttaagtgaaatcagccgacctcaaattttatcacggacgtttgatcggaactacatcgttaagtacctcggcatcgacaccttcaccgtctacgatgctttcaagactactcagaataatcaagtgcgtgcccaggctgagagttacgacttagatccggtgctcgactttatgaaagagcattacgctgcaccgaacgctgaatacgcaggcgttgccaagggcaagaacgtcattgtcattcatttagagagttttcaacaattcctaatcgactttaagttcgaaggccgcgaagtaacgccatttttaaatagcctctatcatgatcaaaatacattaggttttgaaaacttcttccatcaagttggccaaggtaaaaccagtgatgccgaaaacatgatggaaaccggcgtctacggtctaccacaaggctcagtctttacaacgcttggttcggataacaccttccaagctgccccatcaatcctcaagcaaaacggtgactatacgagtgccgttttccatggtaatgtgggcaccttctggaaccgcaataacgtctacaagaactttggctacaactacttcttcgattcttcctactttaacaccgatcctgataacgtcttacaatacggcttgaaggacaaattattattcggtgaatcgattaagtatctcgaacagctacaacagccgttctacacgaaattcatcaccgtcaccaaccattttccattcccattacccgaaaaagacggtgacttcccccgtgccacaactgataatacagcggtcaacaactattttgcgaccgcccattatcttgaccaatccctagaagagttcttcaattatcttaaagcctctgggctctatgataattcaatgattgtcctctatggtgatcactacggtctttcgaattctgataataaggccttactcagtgtattaggccgcgacccagaaacgtggaccgactacgataacgcccaactacagcgtgtgccttacatgattcacatgaacggtttaaaaggcggtatccaaaaacaatatggtggcgaaatcgatgcgttaccaacaatgcttcacttactcgggattgataataaaaattacgtccaattcggcaccgatttattatcaccacaacatgatcaagtcgtggctttccgaaaccataactttgtcactcctgattacacagtactcgatggcaccatctacaataatcaggatgggacagaagtaactgaaccaacagctaggttgcaaaaacaagtcgctgcttggcagaaacaagtgaaccacgaattgagtttgtcggattcagttaacgaaaagaacctattacgtttctatacaccacaaagttttaaaccagtgaaccctgccgattataactatctgactggctatcaacagcttgtcgatattcaaaataaattaggggctaattcaaccagtttattctcgcaaaatggtgatcaatcgactgttgggctctttaaaaccgatgctccagaattagcgggtgatcaatcaagcctcacggaagtgccaaaatcaaaggccctgaaaaaagagtctgatgcaacagcaactagcgatacggaataatcgtcaaaaaaaaacgcaaggacaacatatattgtccttgcgtttttttgacgttagctaatcacctgcgattgaaaactattaaaaacggattcctgagtcgttgtcatgattacgataatttgaaactgcgctgctaccgctctgacatcatttaataattggcgagcatccgttggtggaagttcatctaagaaatgcttgaccaccacgagttgctggtggcttgctaaaccgcgaatcaattgaatccagaactgatcgactggcggtaattcggtgcccaataaactccgactgcgctttaaatgctgttcaatcaatatttttaacgttggtgcaagctgctttttaggaagcaacaagttatcccaaccggacataaaggggagaatcttaggcgcctcataatcaatgacatatgggggttcaggtgattcaaggctctgctgaatcatctccggttgactaaaatagacctgtccaagtgctaagggttgtttatttagcatttcaatcacgcctttctcattttcctaaagcgagtaacttggcaccaaccaataatgtagactggtgcaattagactgataaatggtgcccatagttgggcgaatacttgattggttaaattctgcttggtgctctcatgcaaaatcggattcaataacgaatgactactaaagtcagtcagatgatttttaaataacggttgaaatgctcggggaccttgtattggtcgcaacggcttttgtagccactgttgattaatcagctctaatccgcgccaatagtaggaattgactaataaccaacctaaaatcactgtcacgcttgcgctgattagtaagcaaagcgccgttaacgtataataattgacaattgtatgtcgcgaccaattcgcactagtgaaagtatcgatatcctgacgcatcttcttaaacgcttgccaagtcaaaataccaatcacaagtgcgataacgatagtcagcactaccgcgataaattgatagcgtcccagtaagacttctttactttgaaccagatgtgtcagggggttagtcccctctttagttgtgttaaagttggctaattgctttttcaactggttgaggtcatgtcgttctaaactgatcaagctcagcgcaatcagcatgacgcctaaaaagaggcaatccacgagatagattaacaaagattggcgtaaataataccgaatattagctggaattgatttaatgaagaacatgacccacctcctaataaagatagtgtaaaactaaagtatgaaaattatatgaactctgtggtaaaaattaaaaaaaacgccttaattaagacgtttttttagttcccttaaattgtcttttcttttctttgaatcattaaccaataaacaagtgctgtcagccccattgcgataaacgttgcccccgtataagcgtgaataatcgcgaattgatttaagaccaagtagctgaccaccccaatgacccatgcaatcatggctgtcagatgatatcctttggtgtaccagtatggtccagcaacttcattgagcgcaccaacattgtagtgccgccgtctaataatgaagtaatccaccaagaaaactgcgatttcaggtcctaagaacatcccaatactatcaaggaaggtttcgaaagtggttaaaaatgaggcaacatagaccggaataaaggtcatcaccgttgccaataacgtcacgacccacaatgccggcgttaatttaaatttcggaaaaatattggttaaagccgatcccgcagccattagattcaccgcattagctgtcgtactggtaatcacgatcactaataacgctaaaacacctaaccctaatttggccgcaatggtgcttggatccgcgttgttcgggtcaaaatgatttaacgtaatcgctgtggcaattgtcgccgttaacccgatgaaagcaaaccagaacaggccaatattggcgcctaagaatgaatagcctgtggctgctttcttgttctttgaaaaacgactgaagtccgcagcagcggttacccatgcaaggttaaacgctgctaggatatcgaccgccttcccaaattcaagccgcaagttgctggctggtcgccacgccactaagtctttgaacggtaccattttgaagacaatgattgattcccaagtgactaagataatcactaagatgatgccaattcgttcaatccagcggacggatttttcaccgagcgaaatactgattaaatgcaggacagacataattagaatcccaacaatcaagctcatccggttagtggctgcatcgttgcctgaccagcccatgatttccttgatgatgaagctcactgaagttgctgcaatatacgtattcaccgcagcccaaccgatgaattgtaccacattgataatcgatggcaagacggatcccttcacgccaaatgaggcccgcgttagccccatcgcccccacaccagtttgataccccatgtaggaggccagtgcaagcaagacgtacgataaacagccaacaactagtaacaacgtagacccttgaatcaagccagttgccgcaataatgccgccgataaaccaagtgccgttattcgcatttgcaccaatccaagttgcgaacaaatcccaactgcccatcgttcgtgcgtccttggatactgcatgaattgtttgttgctttgtcattttgataccctccacttggttaattgcattaaaaaaagacctactcctagacagagcaggtccactaatgtacttgttaaccgctcctttgtcagcctcactggactgcccttaaaaggatttatatttataagcattgtattaaacttacttgccaaagtcaactcatgattgttatactcactaataaaaaaagcgaggttggataaaatgctcattcaaaacgtgcacattgagaatcaagaatcattgcagtcaatcagaattgaaaacgggatcattacagcaattgaggcacagctaataccgcatcctaatgagcaagtcatcgacggacatggtcaattggcattaccgccatttgttgatcctcacgtccatctcgattcaactctcaccgccggccagcctgaatggaatgaatctggaaccttgtttgatggcattcggatttggtccgaacgcaaaaaggatttaacccacgacgacgtcaaacaccgcgcaattcaagcactgaaattacaagccagccatgggattcaattcgtccgctcacacgttgacgtgactgatccagacttagttgcgctcaaagccttaatcgaggttcgcgaagaagtcaaggattggatgacgttgcaactggtagcctttcctcaagaagggattctttcttttccaaatggcaaagcattaatgaccaaagctgcccaattaggggttgatgcaatcggtgctattccacatttcgaatttaatcgcgaatatgccgtcgaatccttgaagtttgcttttgaactcgctcaagaatatgatttactattcgacgcacataccgatgaaattgatgatcccaattcacgtagtcttgaaacagtcgcgactctcgcccttgaaacggggatgaaagacaaagtgacggcttcacacacaactgccatgggctgttacaacgatgcctatatgtacaaattgatgcggctgttaaaaatggcggatttaaacttcatcgccaacccacttgtcaacctatttctcggtggccgttttgacacttatccgaagcgccgtggtttgacgcgcgtaaaagaactgactgccaacgggctaaacgtcgcttttggtgaagatgatattcaagatccatggtacccaatgggcgatggcaacatgcttgatgtgttgtatagtggcctactggcaacccaaatcatgggccatactgaaatcatgaatgcctatcgattcattacttacaatggtgctcgtgcaatgcacgtccttgaccaatatggtctcgaagtgggtaaacccgcccacctgattctaatggatagcgacaacttctacgaggctctcaacaagcgcgccgctgttaccctctcaatgcacgctggcgaaatcatcagtgaaacccaaccagctcaaacgcaattgcatatttaatctaaaaaataggcgtcacgacaatttaatccttgtcgtgacgcctatttaaattggtttagctttcacttgtcacaatcgtttcatctgggaaagttaaggtaaaagtggtcccttgttcaggaatactttggacctcaatcgtcccataatgtaactggacgagttggtggacaatcgccaaccctaaaccagattcaccatatttggtattcttacgtgatggatctgctttgtaataccgttcccaaatatttttgacttgttcgtccgtcattccgataccggtatcgctaatcgttaagattgtttcgtggaaaccagcttccgcagtcaccgtaatttgcccattttctgtaaactgaatggcattttgcatgatgttaaacatcacttggacaaaacggtcatagtcggcatagattgggacattctcttgggcgtccaagatgagcgtatcaccggcttcagtcgccttcttctcgaattgctcttgaatattctggatagcttccaccgcattaaacgtttgcgggttcaatttaatttggttagtccgaatcttttcataatccaggttctcgttgactaagcgaatgagtcggttggtttcattttgcattaatgaaatactcttggcgcgcatctcttctggaatcgcatcatattgcaacccttctaacagacccttaacggtcgttaaaggcgtccgcatttcgtgagcagcgtcggccatgaattgccgccggcgatcttcttgccgcttaatttcctcttcagattcattcaacgaatgcaccatctcattaaaatcggtggccaaatcatccaattcatctttaccaggattcttaatctgaacattaaaatctccttcagcaactaggtgggtcgcatttcgtaagcgattaatccgacaaatttgataccgtgctaagacgtaactcaacagaatcccaccgattgtcgatagtaaaaaggcaatcaagaggttcttgcgcatcgttgtcaaaccagatttaacggtttgtagtggtgctgccaccccaatcacgtaaatcagtttgttattgtaaaaaacgggtttgaagaccactaactgttcttgcttattgttattcacttggtgcgaatcacgacttaagctcagccgttgaatctggccattctttaaatgtttccaatattgtttcttgaccgaaactttaggatccggggtaggatacaccatctcgttttcggcgttaaagaaattaaacccaacgtgttgttgggaaaggatttgttgactatcaataatgaattgggtcgacaaggccgcttgagacccctgtttgaaagcttcacgttcaatcacatccgcgtaaccttctagttgatcccaggtgctctcataagcggtccttgtcgaatattgcgtaaacgcaatccccacaataataatggtcgtcataatgacgccgaaaaatgccaacatccattgataaataagcttcattcgcgcgctgcgtctgaatcatcaaatttataaccgacaccccaaacggtctgaatcacttgtggtcctactttttcaatcttttgacgtaacttcttgatatgcgcatcaactgttcgttcgtcaccgaagtattggtaatcccacacaagttctaataattgttcccgtgagaaaacttgacggggatttttagctaacgtcttcaataaatcgaattcttttggcgttaaatctaaaattggtttgtccaataaataagtctcacgcgttttagaactcaacttaaagtgtgttgtttgtacatcaaaatctgaattttcagccgcttgttgtacgttttcttcagctgcttcgacttgttcatcaatcaactcagcacggcgatgtaaggctttaatccgtgcaatcagtgtgattggactaaagggttttgtcacataatcatcagcaccgagttcaaggccaagcacttgatcactttcagaatcgcgcgccgtcaacataataattggtactgtcttcgacaactcgcggattttttgggcgacttgcattccgtctaaacccggtaaatttaaatcaagcgtgataatgtcccaactctctggatcgacactaaaggcttccactgcttcattgccgtcgtaagcgaaatgggcatcccaagcttctttttggaaaaacatactcatcatttctgatacggatttgttatcttctaccattaaaattttcattagaattccttctctttttacgttgctatgtctatattatacagtagataaaccaattacggatgaataatatatgaagaagtgatgaaaatcaaacgcatcacggttcccgtttgcatggtatcgctaagcatgatagcatgttaagcagatatcattatttaggaggccccattttgacttataaaggactagtatttttcgatcttgacggtacactttacaacgaacattctgaagtagatgcagctgttgcgattgcactccgccaattacgcgccaacaactacttaccaatcattgcgaccggtcgctcaccgcttgaaattcaagatgcacttgcaaaaaccggcatcgattcattcatttgtttaaatgggagcttcattcaatatgaaggtcaacctgtttataaaggcactattccaacgcccgtgattgaaaaaaccgtcgcaattgctaatgctgctgacgaagccatcgctttttataatgaagaagcaatccggattacggctgtaactcaacccggcaaagatgcctacaagtttgtcaacgcccccgtccccgaagttgatccagactattacttgaatcattcagtctacatgatgttgattctcacaaacgacaatgacaaggcctatacagaaacactaagtaccgacttaacattctaccgcaacacaccgaactcaattgatacggttgaaaaagattgttcaaaacaaaccggtattaaagaattgattcgctcacaaaacttaatgggcatcccaacttatgcgtttggcgatggtacaaacgacttaccaatgctcgacttcgtagactatcccaccgttatgggcaatggtattccggaagctaaagccaaggctaaatacattacttctaagaatactgaaggtggcattattgagggtttacgccactggggcttaatttaatcacttaactaatccgcgccataacggctcaatcactgtcatggcgctttttttatcttgacgcttctcagtagaccgattaaaattagaatcatctcacttaaaaaggagttactaatgacacaacattcactctttgccaaaaaacaaatcgacgtgaaccaatttaaaaatagtacactagaacgccatttaaccgcctttggtttaaccgccatgggggttggtgcagtcgtcggcgccggtatttttatcacaccagggattatcgccgctaaatatgctggacccggtgcgatgctgtcttacctgctcgctgcagtcgtctgcgcaatggctgccctttgttattcagaattcgcttctacaattcccttggccggtagtgcctacacatacgtctacaccgtcttcggtgaattaatcgcgtggattctaggttgggcacttatttccgaatatctcttcgcagtcgcctcagtggccgtcagttggtcagcctacttccaaaatctaattgctggctttggattacacttacctaccttcttatcgactgcatggacgcctggccaccctggtggtattaatttaattgccggtttaattacgttattgattgggttcttactatcaaatggcttacgcgaatcaacacggattaatacgattatggttggtgtgaaagtcgctgtcatcgtaattttccttggcgttgccattttctatgtgaaaccagccaacttcaaaccgttcttaccatttggtgctggtggcattctttctggggcagcattagcattttacgcctacatcggctttgatgccgtttcaaccgcatcagaagaagttgtcaatccgcaacgtgatatgccaatcgggattatcgcttcattattgattgcttcattattgtatgccgcagttgccaccgtcctcgttggcgtcgtgcactatacaaaactcaacgttggtgaccccgttgcttttgcgcttcaattgatgcatcaaaactgggttgctgggattgttgccctgggagcagttgccggtatgacaactgtcctactcgttatgacctacggcggaacacgtctgatcttcgccattagtcgcgatgggctattgccacccgtttttgccaaagtcagttcaaaaacacatgtgccagttgcgaatacatggattttcgccatcgtcacaagcatcgtcgcaatggtagtgccacttgataagattgctgaattggtcaacattggcacgttattcgcctttgcaactgtttctctcggtgtgatcttcctgcgcaagttaccattttataatgaattgccacaagggtttaaagtgccactattcccatggattcctttactttcatgcggcttatgcttactactcatgacccagttacaactaacaacttggattgtcttcttaatctggttggtgattggcctaacaatttacttcagttacggctaccgtcacagtcgccaataaaaaataggcgttaagcagttttcataatctgcttaacgcctatttctatgcaatctatcgtgaactatctacaaaaatgcatgaacatccgtgaaaatgaggtcatgttgccagcaagaatcgcgacaattggcactaatgcccacaaccagtacttattattcttccgctgttcaacctcagctttcaaccgtaaattctcattttccatcttaaggcgtgcaatttcaagttctaatttatctttgtcatccatgcaactcaccttccgtcctaatttattaccgccattataacagaatttttcaaaaatctcccacctatccactccaacaaaaaaagcccctctaatcttgtggattagaggggctttaacgtgcttttcaaaccatacttctgcggctagctacgtcccgcaaacgatcgactccgtcgctcattcacgaaactaggctagtcctcaaagtataaccggcttgaacgcacttctatttttaacgtgcttttcaaaccatacttctgcggctagctacgtcccgcaaacgatcgacttcgtcgctcattcacgaaactaggctagtcctcaaagtataaccggcttgaacgcacttctatttttaacgtgctttcaaaagcatcctattccggttagctacacaagtcaaacgattgcttacagcaatcattcgccctgttaggctaatcctcacaggataaccacttttgacgcacttctattttttgtgtttcttgttcagaatcttgtcgaataagttgttgtcttgtggattaactgagtcaccacttgcgactgcaaatgcttttagcgcatcacgttgtttactgttgagggtctttggtgtcacgatgttaactgtaacgttttgatccccattacctgtcccgtggagcttaggcgcacccttaccacgtagacggaagacggtattcgtttgagtccccgctggcacttttagtttaacaggaccatggactgtgttgacttcaatttcatcccctagagcagcttggacaaagctaattgggacttctgaataaatttgtgcgccatcgcgcttgaattcagcacttggtgccacgcggaagacgatgaataaatcgccataagggccaccgtttgtgccggcttcaccttggccttgaagacgcatttgttgaccatcttcaacacctgctggcactttaaccttaacagtatgccgttcatcttcgtgacctgttccatgacatgtttcacacttgtctttaatttctttaccagtcccgccacagacatcacagacttcttgagccatcatgcggccgaaagctgtttgtcgttcaacttggacttgacctgcaccgtgacatttgtgacacgtttgggcgcttgttcctggtttagcaccagagccatgacacgtgtgacattctgattcacggttataagaaatcttggtttctttgccgaaaatggcttcatcgaacttcaaatccatccgatattgtaaatctgaaccttgacgaggagcgtttggttgttgccgagcaccgccgccaccgaagaatgaactaaagatatcttcgaaaccgccgaagccttcagcaccaccaaagccgccaccgaagccttggcctgcgccgccgccgaaaccaccgttcataccagcatgaccgtattggtcataagctgcccgtttttgtgggtcacttaatgcttcatacgcttctgtgacttccttgaacttggcttctgcatctggggctttgttaatatctggatggtacttctttgaaagtttacgataggcctttttaatctcatcatctgaggcgtctttacttatccctaagacgtcatagtaatctcttttatcagccattgtgggcctccattcatatacttacgcgttaaatctatcctatcaaggatagcataattgactgattaaaaaaagccaaggccctagaccatactaggttttggctttttttaaaacgcattattatttgtcgtctttaacttcttcgaagtcgccgtcaacagtaccatcgtcagacttaccgtcagttgcattaccttcagcaccagcagcttgttgtgcttcttgtgcttgttgatataacttaactgttaattcttgaacgatttcactcaacgcatcgcgttttgtcttcatgtcttcaaggttgttttcttgttgtgctttgactaattcttctttagcatctttagccttttgtaattcttcgtcagaaactttaccttcaagttctttcaaagtcttatctgtttggaagattaattgatcaacatcgttcttcaaatcaacttcttctttacgtttgttgtcggcttcttcattttcttgagcttctttcatcatgcgatcgatttcttcgtctgataaaccagagttactcttgatagtgattttttgttctttatttgtgccaaggtctttagcagaaacattaacaatcccgttcttatcaatatcgaatttaacttcgatttgtggcacaccacgaggtgcagcaggaatatctgttaattggaaacgacctaaagtcttgttatcagcagccattggacgttcaccttgtaagacatggatgtctacggcaggttggttgtcggcagctgttgagaatgtttgggctttgcttgtaggaattgttgtgttccggtcgattaacttcgtgaagacaccgcccattgtttcaatccctaatgataatggtgtcacatcaagtaaaacaacgtctttaacgtcacctgagataacgccaccttgaacagcagcaccaagagcaacagcttcgtcagggttgattgagtgatcaggttccttgcctgtccagttcttaacagcttcttgaacagcaggaattcgtgttgaaccaccgtttaagatgaccttgtcaatgtcgcctgattctagaccagcatctttcaaagcattcataacaggtgcttttgtccgatcaactaagtctgatgttaacttatcgaattcagcacgtgataaagtcatttccaaatgtaaaggaccgttttcgccggctgagataaatggcaagctgatttgggtgcttgtcacaccagataaatcttttttagctttttcagcagcatcttttagacgttgcatagccatcttgtcttttgacaagtcaataccgttgtctgatttgaagttttcaactaaccagttcatgatggcttcatcaaagtcatccccacctaaatgtgtatcaccgtttgttgataatacttggaagacaccgtcgcctaattcaagaacagaaacgtcgaaagtcccaccaccaaggtcataaactaagactttttcgtctgtttctgtcttgtccaaaccgtaagctaatgctgaagctgttggttcgttgataatccgtttaacatctaagccggcaatcttaccagcatctttagtggcttggcgttgtgaatcattgaagtaagcaggtactgtgataacagcttctgtgacttcttcaccaagataatcttcagcgaatttcttgatgtattgtaagatcattgctgaaacttcttgtggtgtatatgatttatcgccaacagttactttgtaacctgcttcgccgatgtgacgtttgattgatgcgattgtatcagggttagtgattgcttggcgttttgccacttcaccaacttggatttcgccgtttttaaatgacacaacagatggtgttgtccgtgcgccttctggatttgtgataatttttggttgtccgccttctaatacggcaacagctgagttggttgtccctaagtcaataccgattactttactcataaaaaataccctctttttttagatttttagtttaatttattgtgcaacaacgaccattgctggtcttaagacgcggtccttcaagtagtagcctttttggaagacttgtacaacagtatccgctttttgatcaccatcaacagcgaccgtttgcacggcctgatgaatggtcggatcaaaggcttgtccttgcgcctcaatttccttaacgccatgatcttctaaagcatgtttcatatgatcgtatgtcatttgaacaccctttttaagactctcagcactatcatcagttgcttcagttgccaacgcacgttctaaattatccaaaacgggtaagacatcttttgcaagtgattgcccatcatattttaacaagctagcttgttctttttgatgacgggtttgaatgtttttaatttcagcttgtgaccgtaagaaactatcttctaaatcatcatatttcttttggagttcagcaagttgagccgctaaatctggcttagctgcatcttcgtcaggtgcagcatcttcgatcacttcatctgcttctaattcaggttcaaatggcgtttcttctttaggtgtttctgtttctggcatttctgctactggcttttcttgtttctcagccttttcttgcttggtcaaacaaacacgctccttttaagattgatcatcatcgaaattcgcataataatcaattaatttcttcgctaactcttcacggaataaatcgagtaacccaatcatccgtgaatagggcatgctagtggggcccagtagtgcaatgactccctgtccgtgttcaccaacgtcataattaacagtcattagactataatgtttcaacagatcgttggccatctcggtgcccaggcgaacctgaacttggctattggcgcctccaggggacaaatctagcaacttggctaaatcatctgaacgattaatcatgttatacaacgacttcagctgggtgacatcggagaactctgaaaaattcaacaagttcatctgaccgccaacaaataagcgctcttgactcgcctttttcaaaacatcgtcgaagatgtctaaaaagccggtcggagaagccatgtactgggctaatagcgccggtacatccgtctttaacttctgactaaccacggttaacggtaagccaattaggtgatcattaatgattcgaatggctttttcgagttcatcacccgaaatcgcttgtggaatggtaaatacctgattatcaactgtccctgcactcgtcacgataatcgccatcacttggtgattactcaacggtactagacgaaaaccagttaaccgaatctcagccacttccggtcctaacgcgattgctgtatagctcgttaggttcgataagatattagccgattgtgagacgatttcatcaatcttatgatagtgctgtccaaatgattgttggaccgttgccacatcaaccggattgagggttgctggttgcatgagatggtctagatagtagcgatagccttgcatcgacggtacccgtccagatgacgaatgcgtcttctcaattaaaccgacactttccaaatcagccatatcattacgaattgttgcagaactaacgtgtaccggcaattctgccattaacttcttagaacccactggctgaccactctctgtaaaaagacgaataatttctttcaaaatcattaattgcctttcggtcagcatgtcatcacctctttttagcacttgaatatcatgagtgctaattacaattattaatatagcaagaacgtcaaataaagtcaagaaacgtaccggcttttttacggatttactgaaaatcggtccttagacggagggccttactggaccaaaggacaaaataaaaaacgagccgcttcttagatggaagagactcgctttatgaagtggaatatttataacgtgcttttcaaaccatattcctgtgcctagcgacacaaggcgaatgctcagaatatcccccggtttgaacgcactcaataactatctagcagaaactcttggaagacttcattgcctaagaacttacctgattcagttagtcttaaccaatcgccttcttgtttgaggtagccctttgcaatttgggtggcaactgtttcgccgtaaacattttgtaatggataattgaatttatcttgaaaatgactgatggatacgccttgcatcgtccgtaacccgaggaagagttcttcctccatttgttcggtcagtggcagaacatggcgttcaatgactggcaccttattttcttttaagggttctaggtattgttggattgggccgaagttatggtaacgatccttacctaaatagccgtaagcaccggcaccaaagccaaaatacttttcattgcgccagtaagttagattatgcgcagattgaaagcctggcttggcaaaattactgatttcatattgatctaagccagcccgcttgaaactatcaatcgcggcttgatacatatgtgcttcaacatcttgcgatggtaaatgcaacttgccttggcgcatcaagttatagaagattgttttgcgttcgagaatcaatgagtacgtcgaataatgcggtaagtcgagttcaattgccttattcaaactatccatgaaatccgcttcactttgttgtggtaagcggaaaatcaaatcgatactcatattttcgaagccgaccttgcgcgcgttatcgattgcccgataaacatccgcacttcggtgaatccgcccgatctgttttaaaatctgatcattaaacgactgcacgccaatacttaaccggttgacgccgttgtccttcagaacttgcaatttttcagtatcttgtaagtcattaggattggcttcaaacgtaaactcaccaccctcataaggtaagtattgatgaatcccatcgattaaacgttggagttgtgctggtgataaagtagttggtgtccccccaccgacatagatcgtatcaattggttcgtctgggtattctgccatcactaattgaaactcgcgaatcaacatatcgacataatcatcgaccggttgaccttcaatgaaaaccttattgaaatcgcagtagtaacaaatatgctcgcaaaatgggatgtgaatataagcgcctgccattaatgttgtgcctctaatttctcaaaataagttcgggtatcggcttcgtcttggtggagttggtcaatcaaggcttccgcggagtcaaacttcacttcgtcgcgcaagtagtgataccaatccactttcacttgttcaccgtaaatatcgccattgaaatctaataagttaatctccaccgttaccgggttattgctgtggaacgtcacattccgaccaattgaagccatgccaatataccattgaccgcgcactaaaaagcggaccgcataaatcccaattcctggtaatcgttctggtcgttgcgattcgatgttagcagttggaaaccctaattctcgcccgcgtgcttcaccatgcactacttcaccggtcgtttggtaaacataaccgagtaattcattagcttccgcaatcttaccagcatctaaatcctctcgtactaatgtcgagccgattttgacaccattatggtcatgttctgcaactgtcacaatggcaaagcgccctttggcatagtctgacaatgtcgtcatattcgcaatctcttttttaccataagtgtaatcaaagccagccaccactgtatccgcatgtaaagcgactaagtattgatcgacaaatgtttgtggggctagttgtgcaaatgcttcattaaagtgcacgatgtagaaaacatcaacgcctaactccgccatcaattcttgcttgcgctcaaccgttgataaataacggaatgactcccgatcggcattgcgataaacaatggcaggatggatatcaaacgtcatcacagctaatggtaaacctttttgaactgcaatttgttttgctttccgaattacagcttgatgacctcgatgtacgccatcaaaaaagccaagcgccaagaccacttggtcagctggcacttgttcttttgaatatggatgaattaattcaatgacacgcatatttttcacctagttttttttaatgagtcccttgattttgtaaatacattttataagggcgataaagatgttgcgctgctttttcaacttgatagagcgccttgatatgcccttgataggtcaacgccacaatctcatcggtttgttctggcaatgtcaagaacacaccgtttaaaagcttggcccattgatcgtcgtctaaagcaatcttcttgtaatcttcaaatacatggtcaattggcaataaaacgtctgccagttcgcccgcttcagctttttgcgccaattgttccaacgtgatacagttaccaatttgaatgccgccactcttaagacgtgtcaaatctgacatcactgcgggtaaaccaagtttacgaccgaaatcaacagctaatgtgcggatataagtcccctttgagcaaccgacaatgaaccggaatgtttggcgcccagattctgcgtcaaattgtggttcaccatccaaatcaaactgcgtaatcgtgattgaacgttgtggccgttcgactggatcaccagcgcgcgcatagtcgtataaacgccgcccattgactttcaccgctgaaaacatggggggaatctgaattgaatcgcccagaaaactagcgagggtctctttgattttctcagttgaaaaaggttctgttaagcgcgcctcttcaacgacttcaccatctaagtcttcagtcgttgttgataagccaagggtgatttcacccgtgtagactttaccagaatgcaccaattgatcaacaaccttcgttgcttgaccgatacagattggtaacaccccatcgacgttgggatccaacgtgccagaatggcccactttcttcatgtgtaaaatgcggcgcactttaaacacacaatcgttactcgtcatgccgcgttctttatataagggtacaatgccgtccataagtaatctcctttaagtattaactaaactattatagcatagagtgtgaagtcgaacgggattagctttatgatgctgctcaatttattatcaaagcacaaaaaaagatgggacaaaagaaactcttgcccatcctcgctcaatgttgttttatgtaactttgtgtgcaccgaagaaaatggtacccccgtccttcctaactcgattaaatataaggcgcaattagtccaagacaaattgcataagaattttaatttccattcactacgtcacactcacgctactatgctgctagaagccggagaaaaaatgaaagtcgttagtgaacgtttaggccattctcgaatcagcacgacaatggacacttattctcatgtcactcataaaatgcgcaaaaatacagttagtctgatcgaacaaattcagaacgagtaatgttggcaagagcactatcttgaataattcgaaacacaaaaaaatagcagttttgccaaccaacgaaaattgacgttggcaaaatgttggcaaaactgctattttatcactattaaatttttaagaatccttatttaccggctttatcttcatcattcatcttcaaaatggacatgaacgcctcttgtgggacttccaccgaacccacggatttcatccgtttcttaccggctttttgtttttctaacaacttacgcttccgggtaatatccccaccataacacttggcgagcacgtttttccggtaggccttgactgttgaacgggcaatcactttattcccgatagctgcttgaatcggcacttcgaattgttgacgtggaatggtttctttcaacttaccaacaatcgctttgcctcgttcaaaggcaaagtcacggtgcacgataaaactcaaggcatcaacggattcaccgttcaatagaatatccatcttcaccagatcactcgcacgatagccagtcacttcataatcgaatgaggcataacccttggtattggacttcaagtcatcgaagaaatcgaaaatgatttcagacagtggcatgttgtagatgacattaacccgataggtatctaagtaatccatcgtgacgaattcgccgcgtttacgttgtgcaagttccatcacagcccccacataatcgttcggtaccatgatagatgctttaacgtacggttctttaacttctgaaatatttgatgtttctggcatttctgttgggttatcaatcacttcttctgtgccgtcggttaaatcgacatgataatccactgatggtgcggtcatgatcaggtcaagattgaattcccgttcaagccgttcttgtacgacatccatatgcaagaggcctaagaagccacaacggaacccaaagcccaatgcttgtgacgattcaggttcgaattccaacgcggcatcatttaattgtaatttttcaagggcttcacgcaagtcgttaaacttcgcgttatccacgggatacatcccagaataaaccattggttgaatatgccgataaccatcaagggcttctgctgccggattgtcagcaagggtgaccgtatccccaacccgcgtatcttgaatggtcttgatgctggccgtaatataacccacatcaccaaccattaagaagtcgcgtttaacggctttaggcgacatcacaccgacttcagtgacttcgaattctttcccgttattcatcaagcgaatcttatcgccgactttaacagtgccatcaaaaacccgcacgtttaacacaacaccccgataactatcgtagatcgaatcaaaaatcagcgccttcaatggtgcttttaaatcacccgttggtgctggcacgtccgttaccagtttttctaggatttcttcaatcccaatcccgctcttagcactagcaagcacggcttctgaagcatccaaaccaatcatctcttcgatttctgctttaacaacgtctggttgtgcagatggtaaatcgattttattaatgacagggacgatttctaaatcatcgtcgaccgctaaataaacgttggctaacgtttgtgcttcaaccccttgggccgcatcgacgactaataaggcgccttcgcaagctgccaaacttcgtgacacttcgtatgaaaaatcgacgtgtccaggtgtatcgattaaatggaaaatataagtttcgccatctttggcatggtagtgtaattccaccgcgtttaacttgatggtaatcccacgttcacgttctaattccatgtcatctaagacttgcgcttgcatatcgcgcttggcaatagtatccgtcatctcgagaatccgatcagctaatgttgatttaccatgatcaatatgcgcgatgatcgaaaaattacgaatgtgcttttgccggtctaacattcctgcgtaatccattaattgtacctacttcctctgactatcctttaaattataccaagcctgcctcgtaaaagcgaacgcatttaacggctttccaataaaaaagccaaaaccaaacggatgattttgacctttacttcattactaagtcctattttttgtcagctttttgcgccttttctttcttatctttattaggtgtcacttcactgacaaccttcttaactgtgccttcaattacatttttcaaactatctaatcgttcttcgtttgccatatcaatgacttcctttctattttgttcaccttcattctactttttaaccacaatgactgtcaaaaggttcgccttttattatctaaatgctataatttaggcaggcaaccaaatagattgttgcttaattaattgattggagttgacccatatgcaatttatcatgactttttcaaataacgaaaccgttactttttcggaaatggatttgctacatgcttggaagaatgatactacctatttaaacgttggtgatgatcaagccttttatctagatgaaatcttcaatggtagctaccaagacgccattgcaacttctagcgaacaacaactcgctaaagaacgcccaattcttgcattggctggtctattcgctgatgcagattggttaacttttgaaaccaatcctgaaaaatactatcaaacaaaagcaattgtttcactcacaaccaaagattaaccgctaaaagcctaggtacgcctaggctttttataattgctttcatattatgtacaatatacaatcgttaagaactgttattcattactttggaggttattatgtcctatttatttttagcgttcttggggagcgcactgatttcactactattctttaaccggcaacgacccagaaaatggcgtcgcgtactgattatcatcatcgccttaatcggcttaggcggttcattaatgccggtggctgctgcgaattccaagaagaccagccaacatcaagttgatgtacgcgaaaacaaggcggcccgtgctaactcgagcgctttaaaaaaacaactagctacaaagaaaacagaggctagccaactgacaaaacaagttgccagtcaatcacgacttgttaaaaagcagcaaaaagcgtctgagtcagaaagagtccgtgcggcttcagcctcaatcgccgctactagtcaagctagcgaggccgctcagcaacaggctgcaattcaggcaagccaacaagcacaacaagctgctagtgctcaacaagttgaacaaatggtgacaattgcccctaattctggtaaaaaataccatcttgatcccaattgccgtggcttaagtcgtgccaacagtactacaaccatgccattgtcacaagcacaagcagaaggctataccctttgcggatgggaggattagccaatgaaagcaacccgtttgataagtcgcgtggtggtaacaatttcacttgctggtgtcggaacccttttgcaacaaccaactaccgttcacgctaccaccttacgtcaagaaaccaagcgcattaatgcgcacaacaaaaaaaccgaacgtcaaattaatgcgcttcaacgtaaaattaaccagttaaacaaaaaactcactaactatcagcaacaaatgcaaacgactagtcttgagcgtcataacacatcagagctcgcggccctcacctaccgtggtgaaaacgaggtactcgtcaataataaccaaccaagcttcagtgctactgatttggctaccgatcacggtggttggcaaacctttagtaatctcgacgcactaaatcgcgttggtgctgcaaatgttcttttaaatcaatcgatgatgcctactgccaagcgcgaaggactcacttggaatccgaccggttggcataataagcggattaaatctggctggctgtataatcggagtcatttaattggctatcaactaaccggtgaaaataataatccaaagaatctgatgacaggaacacgccagctaaacgcacccgaaatgctggcccatgaatcagatattgcttattatctcaaaaaacaccctaatcgttttgttcgttaccgtgtcacacctatttttaacgataatgagctgctagcccgcggcgttcaaatggaaggccaatccgtcggggataacagcattcaatttaacacttacatttttaacgtccaagacggcgttacattaaattacgcagatggcacaagccaaattgctaaataagctcagaaccacgataaattccttttatcgtggtttttgctatctaacattattgtcactagccatttaaaacttaataatatgagctaaacatacgataatgtacttacttaacttttagggaggctattatgcagactaaatcatatcaagttttaaataacttcgacatcaacgtaattggaattatcctcatgtttattgatcacgtgcaccaaatgttcgccggggctggggtccctggctgggttgattggttcggacgaccagttgccaccatcttcttctttatggcagttgaaggattcatacatacgcggaatcaaaaacgttacatgttccaattactcgttggtttttggattatgaacttgggaagccccattgtccaacacttcttcgaagtcggtaacctcgcactgtcaaacaatatttttaccgatttatacattgccgttttagcaatgtatgggattcaagaaattagtgtcggtcgccgcacgcaccattccaaacaaattttgcttggtggactggcaattattgctcctatcctcttatcattattggcgcttggtctaattgctaaccctaagacaatgatgtttgctgccaatctcgcaatggttattccaaccattatgcttgcggaaaatggccttctcctctacataggagtatttttttatcttttccgaaacaaccggctcttacaatgtcttaccgttcttgttttcgcattccttgacgctggaatcaactccggatttgccttcactggactcttcactagcaatacgcaatggatgatgatcttcgcgattatcccaatcctcttgtacaacggacaaaaaggacgtagcatgaagtatttcttctacttgttctacccaattcacatttggttattattcattcttgcttcattaatgggcgttggcgaataaattattgattctctatgtaagctaaaaactgtaaaaaactcgtttaagtatgtcataatatctttggtaggaagttattaaatttatcataacttttcatctcgtccagaactgacgacgcgaaaagctgataaggagaagggggttttacatcatggttaaatcatatcaaagtttttggtcccggatttttgatttctcaggcacttcaaaccgacctgatttctggtggccaatcatcattaactacattctaggtggtattatcatcggtattattcaaacaataaccggccatccaatttcagaaatctataatattggggatttaggcatctcaatgggtcgtaacatcgtcgtcttcattgtttggattgcaactttatccgttaaaatgcgccgacttcacgatacagaccgctcaggctggtgggtactcattgaattcataccgcttatcgggacaatttggttctatatcctaatgctcttaccaacaaaaacaaaccgttgggcataagcaattaatgtaacagtcacacgtgtggctgttatttttttgcaaacaaaaaaggcgattaacaccgttacggtagtgttaatcgccttttgttaagcgcctaattctgcttaacaccttgttatctaatggagccggcgggggttgaacccgcgtccatgcgcattgccacgtcaatctctacactcatagtcgaacgatttaggagttcgctagtccaaaacgccgtccgacagaagctcggatgaactagctagtttgcaaatctcttttaaacacctcaaacggcagcgtttaacgtaacccaattaatttgagacccggatctaacccttgggtgaagtcaggcggatcacgctatgctggtgtttaggcagctacagcgtaagaattgttattgtttgcagttataattaactgtaacgttgttaacgtagacgtaacctacgaagtgcaactcacgctcacctacacatgtcgaatccgtaacggccccgatatgcaaatactagtttagcatatcagccagtaatatgaaagactttaaccctatttcacccctaagcgtttcttaggaaaccggtcttttaaaaaggtttgtaatttttctaccgtcgttttaaagcgcaacttggcaatccgaatttcaccgacataaaaacaagcttcgactaagtcaccttgtgttagtaattcaatcttagaaatcgctgcaaattgatgaatagtatttaagtttgcaatcaaacttgttttggttaaaccacgaggccaaaaagcaatcacaattaaaattacaacagagccgatacctgtgatttgatcgctgagcgttctgcccatcactaacgttaaacctagtaagaggattccagcacaacataaaaaaatcgtccatagtcgattccgttttgcgcgccaaaccattttcgtttcaacaatcagccagataatgagcaaggcaattgccaataagccataaaataatgtaaaacctgtcatattcccattccctccactaaaaaatgaccagccatgcgctggtcattttcactgatgccttagacgtggccaatttcaacaacgtctctggcaatcattacttcttcattagttggtactaataatactttaacgcgagaatcgtcagcgctgatgacgcgttcttgagccatcacgttattgcgttctggatcaactttaacgccaaagaaactcaagcgatcggcgatgcgttggcgcattaagatgtcaccttcacccattccggctgtaatcactaggacatcaagaccacccataatggcaacgtatgaaccaacatacttgattaaacgattgacgaagatatcaattgccaattgtgattctggacgttcttcacgcgttttttcaagatcgcgcatatcaggagataatccagaaatcccataaatacctgatttagtattcaaaatatcgatcatttctgctggatctttaatgtttaatttttccattaaaaatgcaacgagtgatgcgtcaatgtcccctgaacgcgtactcattgtcacccctgcaagtggtgtaaagcccatggatgtatccaacgatttaccgtctttaatagcagtcactgaaacaccactaccaagatgcatggtaatcatctttaattcttccaatggtttgcctaacatttcagcagcacggtgggaaacataccgatgactagtcccgtgggcaccgtattttcgtgctccatacttgtgataatattccaacggcaaactgtaaagataattttcttcaggcatcgttgtatggaaagatgtatcaaaaacagcaacctgtggtacatcatgtaaaatcttgcggaaagcacggataacacctgcttcagcaggattgtgtaatggtgcgtattctgacaattcttcaatccgttttaatgacgcttcatcaattaatgcggatgacttaaagtcttccccaccggcaacgacccgatgaccaatcccactaatttcactatattcattgatgattttaaattcgattaacttcttcaataacaaatcaaccgcaacatcttgcgtcttaatatcctgggtcattgagaatttttgaccatccccgtatttaacggtaaagactgaatcggataatcctaaacgatcaaccatcccttgtgcgacaacttgttcttcaggcatgataaataacttccatttaagggtagaactaccagcgttaattgctaatacttttgacatctaatcaccttttctattcgattattgtaaattatctttatgccaagtccggatcttctgtagatacgttgcaaacgccttttgatcgttagaatttggaaattcacctaataaaatttggtccacttgtttagccccggcaccttgtttttgaaggactaaaattgctttttgaccttccttagtcttaaacaagtttgctggtaaactcaataagccttgcaaatagacatgttttgtcacccatttaatcagttgcttagcttcatccgtttccaaaatcacatttggtactaggaaaaagccatagccgccttctttcacataatgcatcgtttgttcaatcaacaagtgatgtgcatatgaatgaccactggcagcgtgggtttcaaaatcagccgcccgttcatctaatggataaaaaccaattggtagatccgcaacggcgatatcaactggtttaaccagtagcggttcaatcgcatcctgatggaaaaaggttgttgaatgcttctgcaattcactactgatgcccgcaatttccaacaaactatcatcattatcaaccccaaaaccttgcacggtattccccgttagtttttggatatgattgattacggttgccaataagttccccgttccaacaactgggtccaaaattgtcttgatttggtcagcaccaccaaaaacctctgccaaataagctacaagatagccgatcgcatctggtgtcatttgcttgtttggttccactttaacttgacgcaaacccttgagcgttgccaactgtaatgcttggcgaatttcttctgcttcaaattggttgagattaaccgccgcataaagcggttctagttgtgcaacagtggcagcatctggtaagccgtcttcaacctttacgcggccaccatctgcaatattagcaatggtctcggtgagtgcatccaaataggttgtttctaaattcttttcaattaattgtgttgtttgatcgagttgatcaaacaacgtttctacagcactcttaggcaaaatagccacctctattcattagattcctgttatattctatcggtattctaacggcaaagcaagtaatacaggtgggtatacctagaattataaatcatagtaagcgctttatcaaatagaaaatttatccttgatctgtttcattctgatctggaaactgttttcgataaccattgtttaactcaatgatgattaacttgtgttgctggtcgatacgactcttaccgatgttagtctttataccttgaattgactgagtttgccgcgctttatttgttaatttaagcaagatttgcgtttggtaatagttagtcaaactgacgtaactctgttgttgctgttggtaactgtgggtcacaatcaacaacgcacttgtcaccaagctcaacatcaaaactgcattcaagagcgcgactgcagagcgtttaatctgtatttttcgtgtcatgttgcgcctccaaaaaacattcatgttgataggctgtcccatcgcttaagcgcgcttcgagttctaaaaaaggttcatgatacaccatttttaaccgcgagaccccatcaaacagaggcatataaccattcttcgtactcgaaaccaccagttccttcttagttttcgttaaggtatagcgtcgtttcgaatctttagcgacggttaattgctgttcataattcgcctgttcaattgaaataaattgagcgtcatccagaaaacgatcaagttcaatcatactaatgtgccaattaatattctgacgttccatctgggttaattgcgttgtgtgcgttagtgttttagtggttgccaatattaattgactgctcaatatcagaataacgagagctacaaccatttcaatcagtgtaaatccagagcgtttagtaacaataccattgaagtgcaactcgctcacccgctttatttgtgacataaatggcctgttttttggtgacgacttggtatgtttcccgttgcaactgccattgtgctcgtggcggctgctcatttgccaatcgattggcagccattgccattacagcatattctgtagcagcacaccgccgttgaacttgatgtgctttaaactgccgtagactcattgtcaaggtcaagcctcccatcaggagaagacttaacgccacgatttgttctattaatagaaatgccggtctacttcttaacatgtaacatcccccacatcatctggacccgatattcataacggtgcccatcaattttagaccgacaaatcaatgaccgcggtctagcagctgagtcatgattaaattggatcctaaaccatgtttctggatcgacgcacatcaatgtttctggaatcgggatatccatactttggtattgtggatccgcacttgtgtaatgcaacgtgtggttggtttgatcccaagataagtgcacattatgcggctcaacagcgacatattcgcgagtcgcatgccaagacgcttcaaattgttcaaaaaataaacgctccgcctgccgtgcacgataatctcgaatatgttgcaacgcaaataaactgactactccaacaatgaacaaaacaagacagctctcgattaaagtgaacgccttattttgtattttgaacaactttattgtccttaattgttatgccgcgtttttcagcttgtttaacctgattattggttaaatatttttcacctgatgctaaatcggctagactcgacaccgttttaccgtcatcctcagctaattcaacttgtgtttgaatcgttgccactagagccgtatccgttttttgctcagctgtctctttctgatgcattaaattaggtgcaattaacaagactaacattgctatcacagctagcacaacgaccatttcgatcaatgtaaatgcatttcttttcttcttcatgaaattccctccattgtatgatatagcggtaataaaatactgagataggtacaaataatgatgatcccaattaggataaacaagagcggttgtagccaattcaccttctgtttcaattgccgttgcagttcatcgtatttaatgactgcaagcagatcaacctccttggccatctgttgtaacggacttcccttagcgagcactaattgcagctcaggtggataaaaaacgccatccgctaagttcgctaatagcgtgccccccttttggacagccgtttcaagttgttgcattaattgtacaagccacgatgttttcgccaaacgatgtgtaagctgatgcatttcggccaagtttaagccgttattcaggcaagtcgctaaatcaaataataagcaatactgatagtaagcctgcaacgttttaccgatgaagggccatctaaatgccgccgccaatcgttgtaatagcggtcgccgatgccaacggaataaatacacactaatcagaccaccagccataataacgaatgtccccatcactctaaaaaatagttgtaatggtgatgtcgccgaagttgttgggttaaactgcgcgatttccggaaaaagataaatctgcatcatcccaatcaacgccccgagaaaaaggagtagaaaacagggataggcaattacgccaactaactctctacgccgtttctgttgaattcgctgtaattggccaagatgtaacaaacactcgcctaagtttccctgcaactcagtcaattcaatctgtgcaacaaggtgtgttggaaacgaaaccgccgctaagcttggtgctagtcgttttcctgcttctaacccagtttgcacctgatgcagccactgcttttgtgtcggaaaaacaatcggcatgaactcaagtgcttgttgtaaagaaaaaccattttgcagtaagcgccctaacagcaacataaattcagtattgaattgaacagtggttttagtcttcatgaacagcctcctccaactgttgtgcagttgctaactcatagtgggccgctacattgtggccttcgaccactagtgattgataggcaacacccgctaaacaagcggttaattgtgagtggctaattccaagatctaatagacggtccatcacccccgttgtacttcgcgcgtgaatcgtacttagtaccaagtgaccgctcaacgccgcagaaaccgcgtgttgggccgtctgtaagtcgcgaatctcaccaataattaaggtatcaggccgtaatcgcaaactgattttcaacaatgctgcataggttaaccctgcggcttcattcacctgtaactgtaagaaagctggctgttgaatctctatcggatcttcaatcgcaaccaccatcttatcttgcatgacttgttccgcaagatagtacaaacttgttgtcttccctgaaccagttggaccggcaaatagcaataatcctggttgctgaattaactgcattaaacgacttaaaatctgcgagtcgtcgcaatgataagtctgcccaatgggataaatgaaacgaacaactaaactttcccgattcaaaaaatcccccacggttgccaaccgtaaataaatcaattcgcctgccacctcgatcgctgaacggccggtctgtggacgccgagtttcactgatatccatccccccttgatacttcatttgattgagccattgattgccttctgacagagtaactttttgtaacggctttagtcctgtcgctaagcgttcaataattgcccaacccgtcgatagtggtcgaaaataaagatcctgcgctttttccgttgcgcacttttgcaaaagggttgttaatacttcggtcatctcgtccctccttcctgactaaccaaagatacgcaaataaccggataattttctgcacaaaaaaagtgcgttgcaattacttgcaacgcacttatcaaacaaattagtcttcttctggtagttcgccagctgtataaacttcttgaacatcatcgttgtcttccaaagcatcaattaaacgttggaattgttctgctttttcaggatcaaccggtgttgtattttgtggaatcattgttaattcagcatttgccaatgtgtatttcttttcaagaatatcacggacatttgctaattccttaggatctgtgtaaatttcaaacacgtcttcttcagtttgtaaatcatccgcgccagcttctagaatgtcttcaaacatttgatcttcatcaacatctaagccttcacgtgcaatcgcaatgtaaccacgacgatcaaacatgtaagcaactgagccagaagcacccattgtcccgccattacgagtaaatgcaacacgaacgtctgaacttgtccggttcttattgtcagttaaagcgtgcactaaaacggcaacaccacctggtgcatagccttcataagtaatttcatcgtagttcgcgccatcgctaccgtcagctttatcaattgcccgtttgatattatctttaggcatgttagctgaacgtgctttatccataattaaacgtaatgcggcgttagaacttgggtcaggaccgccacttctcgcagccatgaaaagctcacgggatagtttttggaaaatcttgccgcgttttgcatcttgtgcgtttttacgaccctgaatattatgccattttgaatgtcctgacatatctaactcctcttttcgattatagaattctggtactaagtcgttttctatgatagcaaattaccatgctaaaagcaatgatagtcgggctatcgtctctttttttgtgtaaaaatccactgtagtgcgcaaacaatcacaatccccgttaatgcgccaacactgtccaacatcacatcttgaaaaagtggcgtccgatcaccagtcaacatttggtgaaattcgtccgtggccgcatacccggttgctgccagccaactaaagataactgctaaaaaaccaccggttacgcgtggccgtagccctaaataactaaaagccgccaataagaaatacgtcccaaaatgggcgccttttcgcacgaaaaactccacaaatttgaaatacccagatgcttttacactctgttcactgcctgcataatggaacgaaaattgacttaaccaagccttaagtggttcattcttgagaaatcgttccaaagtgggcaccgatgtttgttcatgatacgtcattgaagaactgtaaaataagatcgccatcatcaccagtgcagccactaagaaccaatcacttttacgtttaaacattgctgacctccgaaaaactagtatttctctattataccaaagcacacggttgtgacgagcactattattcgttatactactctgaagaaagagggaaattctatgtctgatcaagatcgcttttaccaaccacaaaacgctaaagatgcaatgcgttttgttcaaaaacttttcaatcaatataaccaagcgccactcacagaagaactaattgcctatcatcaaaaattattggcttatctcactaacgatgttacaaccgaagtccaaaaacaagcaaattctgaacaagccgaaaaactgactggaatgattgaagccatgcaagattggttgaagattcgcctcagtggccaaccctatgccgggaaaatgcaacacttcaagttcgttcctgatagccaacaagcccacttcaaaacccgcacgattaaaggtggcaaaaaagcaaataacctcagaacatctgcccgtcactaattcgccttgctattttagctaaaagtgctaaaatatttttgtaagcgtttgggcccgtagctcagttgggagagcgcctgcttcgcatgtaggaggtcgccagttcgaatctggtcgggtccatcaatattaaataaaaccaccctattatttattagggtggttttttcgttcaattatttaattaatcgtatttaaaacgtctgtcagcgcttcacgggttaaaggattaggaaaactgtcctgcttcatttctaataataaccatgtacctaactgtagaaattgttcttcaggcattgcgtattgtaattttaataatcgttgggcggcccctctagtatcgttggtagcaattaaacttgccaattccctttgaaaaggcaattttttagcattttcttgtggaaagacaacctccgactgtgaattaccactttgtttcgataacaaataacccattccttccgcaaaagaatcaacttgtcgcatcaaccagtcttttttattgtccattttcatcccccccaattatgattattttaacaaattattatttgaagaacagtatttaaggtcacgaataattctctaattcgctagcctcaacattattcattttcaaagtgcacaacttaatcgttgccaacttctgcatctagcgctatattattggtaacccattcacaattcgaaggagatttttaatcatgacagataaagtctttacaaaagaaacactcgctcaatataacggtcaagatggtcaacccgcatacgttgccgttgatggcgtcgtttatgacctttccgcaatcgccccttggcaaggcggcaaacattttaaaggtttaacagccggacgtgatttaagcgaatttttcgccaagtcacatcacacaccagccactttaaaacaagccgttcaagtcggcacttaccaagcttaataacaaaaaaatctgccatcaacaaaattgttgatggcagattttttaataattcaatattcctagaaacatcctagctgctgacacgccctagaataatagtgtaattaataaaatcgcgaggactacctgtacggtcactaatccgccggcatatgctaataaacgtttaccttggctgaagagtgcctttaagttcaagcgtaacccaatggctgctaacgccgttgtttcacaccatgtactcaagaaatggcacagtgtaccaaattggcttggaaaaacccgtaagctatttaagacgcagaataataggaagccaatcacgtaccatggcactaagctactcttcttcgctaataattgttcgctcagttttgtatcactgactttactttgtttcttttgatgtaagtaaccaaaaccgctgacaacaaaaaccaaacagataatccgtaaaattttgaataaggtcgctgtgacaaccgttccttggttaatcatcgtcgcactggcaaccacttgaccaactgactgcactgttccaccaattaacacgccacggagttcattattatgtccccacatcaacgttccaataactggcaagagtaacatcaagatggtccccattagatttaccaatgtaatcgcaatgccggtatcttcgttatcggcatcgatgacgggcgcaattgccccaatcgcactcgagccacaaacggcattcccaccggccatcaataaataggtaccttcgctaaattgcaaccggcggccaaaccagatggcaaatccaatcgtacaactcatttgtaacacggtaaacagcacaccatgccagccgatttgttgaatactttggaatgtaattgtcgcacccagtaacatgactgaatattccaataattttttctcggaaaacttagttccggctgctaataccggttgttgcaaccaagtattgccaagtacgatgccgacaaaaagcgcaatcgttgcgccgcctaacattggtaaccataatttagcgatgtaataactggcaatcgcaatcgctaacgataacgcaaagccaggtattttttttgttatattgtccattgctttactccttctcacttgttatcttaaactataccgaaactctttcaattaataaaataaatctttataatagttgttattaagataacgaatagaagtgatgatatgtttaaaattttaacaacttttaaaaccgtttatgaaaccaagaattttacaacggctgcgcaactgctttttctatcgcagccgaccgtttctgtgcaaattaaacaattggaagatgcgctgggggtcacactatttgaacgcaatgggcgccagcagatgacgccgactaagagtgctgatctcttctaccaacaagcacaacaacttcttgatttatgggaccaagatttgcacgcactccatcatcaagatggccagccaaaaacaccgtgccgaattggcgcctcgcacaccactgcaacctacttattgccaaccctgcttaaagcgcatcggccagcccttgaaacactcgccttagatatcagtacactcaactcatcgcagattgttcaagaattgacgcagcacaaactagactttggtttcattgaaaaaccattaaccgaaaaagacttgattcggacgccactacagaccgatcaactggtcctagcaggtcgcccgaatgaaccttggttacttcgtgaacagggttctggcgtctatcactacacgatgaattacgtcaaagaaaataatttaccactcgaaaacgtgatgaccatcaaaagcaatgcgatgattatccaactattaagacagggtatcggccaatcattagtttctagcgcagccttacttgattacccagaaattccctatcgaccattgtcccaacaatatcaacgccaattctaccttgtcgcccggaagaatttgccagcaccaattcaatcatttattgcgttattaatggcgaccccactaccaattgaataggagtgttattttggaaaactcaccacatatcaaaaaagaattaacgggctacatcatccgtgacgttttcagctcgttaggcttatccatctatattttagcggacacatattttatcgcttacgcagtcggaccaattggcttggccgctttgaatattgatctgcccatttttaacttatttaacggtttaggtctgatgctcgggattgggggcgccacgattttctcaattaacaagagcaagcatcccgaaaagagtcgctcgattttcactcaagttctttcttttgggattttattaggcctcatcatcatggcgctcggcttaatttttattcacccactactccacttactgggtgccaatcatgaaacgctcgccccaagcttgacctatttacgaattattttaattggcagtcccttatttatcatcaataacttagtcttaagtttcgtacgtaacgatagtaatccacatttgacaatgattgcgacactttcacaaagcttattcgtcattatcttcgattacctcttaatgttccccctacacatgggcatgatgggtgctgcgatggctacgatttgttcgccaatcgtcagcctactcattttgacacaacaccggcatcacccacaacggttactaactttgcagcacttaaccttacgttttaaaccgacgttcaaagcaattcaactcggtttcccatctttcttaactgaaatgagtactggggtcagcattttcgtctttaacattgttattctccatctcagtaataactatgccatcgccgcttacggcattatcgccaacatcttactagttggtctatccctattcaacggtgttgcagtcggggttcagccaatcgttagtcgcgaatttgggaaacatcattgggataatgtcaaaacgagtctcaaaatcggtttgctttccgcactcgggattgcggtaggattatatctcgttttgattggtcttaaattaccgatcatcgaaatttttaaccatgaacacaaccaacaactgattcgctacgcgtctgctggcattcccttgattttcattagttttttcttctcaagcatgaacatcgtcaataacttattcatgaccgccattgcgcaacctcgattgtcatttttcgtggccatcatgcggggctacatcgttttgattgcgagcgtcttggttctttctagccttttcggattaaccggtgtttgggtgagtgtcccattaacagaaattttaatcttcatcattggaatgctcatcacgcggaatctcttgaaaacaatcgatcaatagtattaaaaaggtgtgtcacagctcaacttgctgcgacacacctttttttatttaaacatcaattgttgaatcagtgaaatgacggttggattatccggcaattcagtatgggctgcatggtgctggctcaccgaaattgtcatataatcagcaacttgcttttgaaaaatgagccgaccagccgcaacactcgctgctgggacaatcccatcattcttatcgttaattgtgccgccgactgaatagaccactaagtctttggataaatgttgccggcggctctttaaatcagctaacatcggtgtttcctgagtgatgtgctccgacatgccattatatggcgttcccaacgtcagtaatcgcgtaatcttcggtccacttccactacgctcagcataccgcgttaatacaagcccaccgttggaataaccaaccccaccaaaatgcgtaaagtggtattgtttagctaatttacctgctgccaatttaaaccattcggattgtttaaagacgttctcattaccatctgcattgttttcaaacgcaaccacaatcacggggtgttgtattttttgatcaaagcgaccactggttttcaagtgaccattttttaataccgttacttttaaaacatggcgtgtggcttgacggttcaatttagcaaaggtgccattaaacccttcaactgttccattactccccggtacgaaaataacgggctggtttgcggtggccgaagttggctgaataatcgatggcaccgttgttggaccagtcgctacatgaccgataaccccaccaatgccgaaacacaagatacaaattagtaaccattgccattttttcatttgtcatcttcctttgaatcaatcaattggtaatcgttctgtaggtagaatcgcttggatatcggctgcaatcggtgctgtaatcgagattgattgttgactgaatggatcttgaaattgcagtcgatacgcgtgcaatgcttgtcgcgttatccctaaatcaagcggcccatcatagagctgatcacccaccaatggatagcctaacgcgctgaagtgaacccgaatctgatgcgtccgcccagtatgaatctgaactttaaccgccgtcaactgacccgatgcacccaagcgccaataactcgtccaagctgactgaccatccgccaacacctcacgccgcggttgatggtcgatttgtccaatcggttcacgaatatcccctgatgctggtaaacccgttcctgaaacaactgctaaatagaatttttgtaattgatgctgttcaatctgcggttgcaatagactttgtgcaatttggtgtttgccgactaaaacaattccacttgtatcaaaatccaagcgcgtaatgatatgcggtactaaatctgttgcaccctgcgcttgccagtaacccttaatgcgattcaacaaagtatccgtttgattagtgggacccggaatcgttgccaagccagctggtttattgaccgccaaccaatactcgttctcataacaaatagtgattggttcgtgactaacagcaactgattcatcggccagttcagctggtaactgcaatgtgaccacatcgccgcattgtacctgatcactaggcgcacttttttgcccgtttactagaatcggttggcctaacgccttaattttggcgtacaatcgttgactgatgccacttgctagcaagaattgtttaacagattgtggttgattgacgtgccatttaatttccattattcatttcccatctttgttctacttactgctattatacgatttatagcttgccaatgccaatcaatggccgaccatattgtttgctaaaagcttcaccaattcgctatgcttaaattagtaagtaaaagtggttgccttttcaggggaacgtgctatactaaagttacttactaataataagtaaaacaattggaggtttcactatgacaaaaaatatcgcagttttaattggtagtttacggaaagattcatttagcaaatcagttgctaaatcattgatgccattattcccatcagattataatctagaaattgttgaaattggtgacttaccattgtacaaccaagattatgatgatttagatcaagtaccagaagcttacacaactttcagaaataaaatgaagacaatggacgccgttttattcgtcacaccagaatacaaccgttcagtaccagccgtattgaaaaatgctttagacgttggttcacgtccttatggtgcaagcatctgggataacaaaccagctgaaatcgtcagcgtttcacctggtgcaatcagtggtttcggtgctaaccaccacttacgtcaatcacttgttttcttgaacatgccaacggttcaacaaccagaagcttatatcggcaatgtcatgaacttattagatgacaatcaagaaatcacaaacccagatacacttggtttcttccaagcaatcgttgatgctttcgatacattaatcaaacgctattaatcgaattacacaaaaaacgccccgactttcgtcgcggcgttttttattttgtattagtttaccaattcgttgcattccagattcgaccatcaagttcaccttggcgttgttcaatccgtaatgctagttcatcactcgtttgttgaagcgccgtataaaaagcttgctcttcatacgttgtggcttgttctttttgtagttgaatttgttctgttaaccaatccattagccttccccctcttcttcgcgaatcagttggacttgccaattcaaatcggttaattccgatcgtttgtcggcgaattgttcgcttaaaagcattaaacgttgttgcgcttcaggcgatgtggcttcagcagcctttttagtcagcatcgcttcaaaccacgctaattgctgatcaaaattgaactcggattgcgtcaaataccgttgataatcgatgaccaagcattgtttatcagtttcttgccaataacccaattgatgaatcgcaagtggtggtaaataggtcatccctagcttacgagccaccaattcatatgggcgcaaaatttcagacagcgttgcttgttcactgccgccagcttgaaaatgtttagccgccgtaccagttgaaacgacaaccccgagtgttttcccggctaatggttggcggccattaaaggcaaattgccccgttaaaacggtgtccaaccacatttttaagctcgctggagcagcataccaatagagcggaaattgaaaaataatccgctcatggttgcgtaataatgcttgttcagcagccacatctaacgtctcaagcgcatctaagtggtgccaagtgatggcttccagtggtgctgcactcgcttttaaaaagttttggaccatcgacgtctcaatttcgggatggctgataatcaccaatgttttcatactctgccaactttctatttctaaagtttaattgtacaaaaacatggcgtaaattgcgactaatagagttccaaatattgttcgcgttcccattcggaaacttgttgacgataagctgcccattccaatgatttagaatccatgaagctctggtagagataaggccccattgaatctttgataatctcatccttggctagttccttcaatgcattgtgcaatgtggatggtaggtcagtgatgtgattttccttccgttctgtttcgtccatgctatagatgttgcgatccacaccagcatcaggcaagagcccttgatctaagccagataaaccggctgccaaaatcgacccgattgctaaataaggattggcacttggatcaacactccgtagttcgagacgcgttgataacccgcgtgattgtgggacccgaatcaatggtgaccggttatgaccagaccatgcaacataaaccggtgcctcaaaaccagggactaatcgtttgtaagagttaactgttgggttgttgattgccgtgatggcgcgtgcgtgttgcaataagccagctaagaaatgataagccgtttcggaaagttgttctgtacctttttcatcgtagaaggcattcgtaccatcttgattaaagagtgacatattaatgtgcatcccagagccgttgacaccgtgtaatggttttggcatgaaggttgcatgtaatccatgtttccgagcgattgttttaacgactaatttaaaggtttggatgttatccgctgcatcgactgcatcagcgtatttaaaatcgatttcgtgttgtccgggtgcgacttcgtgatgactggcttcaacttcaaagcccatcttttcaagttccaaaacaatatcacgccgacagttttcgcctaaatcaacgggggcaaaatcaaagtagccgccttggtcgttgagtttcagcgttggtttaccgtattcatctaatttaaagaggaaaaattctggttccggtccaatgttaaagtctttgaaccctttatcttgcatttcgcgcactaatttcttcaaattattccgtggatcgcctaagaatggttctccatctgcggtatagacagaacagattaaccgcgcgacttttccatgttccgcttcccatgggaaaatgagccatgtacttaaatcaggccgcaaatacatatcactttcttcaatccggacaaaaccgtcgattgaagaaccgtcaaacatcattttgttacttaaaactttatctaattgactaattggtacttccacattcttgataatcccgttgatatccgtaaacattaaacgtaagaacttaacgttttcttgatccactaattgcttgattgcttctgctgtcaatactttacgtgccattaatccgtcgccccttaatataatttagatgattgtgaaatggttgactgttgtccaactaagccgccgaccgataataattcattggccaataaccgccgcgctttttcgtctgataattgtttatcacgctgccgatccgccttcttctgataaatctggcgaatctgtgccatcgtggtgccttcagctaggtaatccttgatttccaacaaacgatcaacatcgttcaacgaaaacaaccgttgatggcccgttgtccgttcaggaaaaacaagcgcctgtgcttcataataacgaatttgacgcgcagtttgtcccgtcaatttcattaccgtaccaattggtaaaactgctaagttgcgccttaagtgtttttcagccatccatttcacctcacttgcgttttatcttaccagtcgcctttcaaacggtcaacatttgatgtcagattttctaacatcagccaacaaaaaaaggtaaaccaatttggtttaccttttaggcattagtcttcatcgatgatttgaatcaaaccacctgcaagcataaacaaatgcgttaccaccggtccaacaaatttaaactggcgcttctttaactctttcgcaagttgcgtactgatcggcgctgatttatcggacacgccagccatttgtgaatcaagcaattgcggctgaccatcaacaaacgcccacaaatacgctgaaaaactgccatattcagtttggatggcttgaattgcccgcgcattttgaatcgttgcccgaatcttacgcgtattacgaatcatatctggttctttttgcaggcgttcaacatccatttcatcaaattgtgcgacttgatcaatcaccatccccaccatttgttgtcgcagaactggtattttacttgcagctactttccagctcaaccccacttggaagaccccaactgttaagagttcaaaccaaatacgatcatcgtgcgttggcgtgccaaaataattgtgataagcctgaaccccatctgtcgccgtttcaaagttgttttttgctgtttcatctaccatcgataaaccgcctgtcctgcgctttctgctggaaccccaactttttccgctaattcgctgtaatgtacctctaaataattaaagcagtcagttgtgtcatgcgtcataaaataaggcagcaaagccatctgatcatcaaattgaacgtgttcctgttgtgcataagctttcagaacttttgccaactgaagaaaatcctggttggtaatatagtatggtgctacggattgctttgtatcaaccgtcacgatggcccgataagcgtgcccgataccttgtaacccgccaatggttgatggtccagcagtctgcatgaccgcataatgaattgttcgaatttccgttgtcgcaagttgcttaacaacttttgcgggcatgacttttaaaacatctgtctgctttaaacaaatttggcgcggttctaatacaattaaataaggactccgtgcttgccgccaattcgctggcattgtttggccatcactagtaacagttacatccgtcaaagtggcactgaactgttgtgctaaatccacatagtgttgttcgggttgttgcataatccgtcctaaatcggacagcggttttgtattttcgctttctgccaaatgccaatgttgccgcaaccgcccaaagaatgaattcggtttagtgaccgtttcaaccccgagcaaagtattcaaacttacattatataatttggcaagaacaaccaatgtattcaagtctggtgcacttttatccgtctcccatttagaaatgacttgtcgtgacacattaatctgctctgcgagtgtctgttgagagtagttcgcatccaaacgaaattgttttaattgttgaccaattaacacctaaccacctccaagacttaccgtagcgagaatgacacatttatactagcaacaatccaaagcatctcttaaaaccgaccgctacgattcgttgcacccttatcataccatgcttaacgcacaaaaaaagcggtcaatcaaacgcgaatttgattgaccgcttggcatttatttttcaaagaaggttgtttggactgcccgactaatcgcgagtttaacgtgcgcgtaagttaacccaccttgtaagtaaagtgtatatggggcgcgcaatgggccgtctgctgaaaattcgatgctggcaccttggataaaggtcccggcagccattacgatttgatcttcgtaaccggcaaaatcacttggaatgggggtcacaaatgaatcgattggtgattgcgcttgaacacaaccagcgaacttaaccatatcatccggattaccgaagttcaccgtttggatcaagtctgttctaggggcatcccatttaggtgagacactcaagcccatttgctccaaaagcgctgcttcaaaaacagcccctttaatcgcattaccagtcacacttggtgctaagaagaaaccttcaaacatcaattgcagattgccttgtgtggcgccttcactggcaccaacacctggcacagtcaggcgataaccaatcatttcgattaatttttcagtcccgacgatgtaaccacccgtttgcgcaatcccaccaccagcatttttgattaaagaaccggccattacgtcggccccgaattctgttggttccgttgtttcagagaattcaccgtaagcattatcgacaaagacaatcaattcagggttaatgtttttgacaaaggcaatcatttccttgattttatcaaccgtgaaactatcgcgatcagcatagccacgtgaacgttggatagcgaccacttttgtcttagctgtaattttggtccgggccgtttcaaaatccacggcaccatcagctaataatggcacaaaatcgaatccaatttggaattcttttagtgaaccaatcccgttaccggccatcccgatgacttcttgcaacgtatcatatggttcgcccgtaagatataaaagatcatcgccaggccgcaacatccccaataaggccgttccaatcgcgtgtgtgccggaaaccaattgcggccgcacaagcgcatcttcagttttgaaaacgtgactatagacggcctctaacttatcgcgtccttgatcatcgttgccgtaaccggttgtcccgtttaaatgcgattcagaaatattttctgcttgaaacgcttcgagcacctttgcttgattattgatgatttgttcatccagtgcttgtaaacgcggtgcgatttgcgtatcaactgccgcgattttagcttgtaattctggtgctaagtttgcttgccaatccattttttaaccactccatttctattattgctgtaaccattgttgtaaatcggtttgaatccgagccaaatcggcttcaggttgttcaaccagattataccaattgaccggaatctggtttctaaaccacgttagttgtcgttttgcgtagtgccgtgaattttgttttacttgagcaattgccacgtctaatgaacagtcactatcaaagtatgggaagaactctttatacccaatcccccgcacggcttgcggactcgtttcacgatgtgcataagccaaccgcgcttcttctaaaagtccagcatcgatcatttgatccacccgctggttgattcgctcgtataataatgcacggtcacaattcaatccaataataaacgtatcataacgtaattcttttggcttttgttgtgaaaacaaagttcccgttgtttcataaacctctaatgcgcgaaccacacgccgtggattcgcactcggaattttagcggctgcttgcggatcaatttgattaagcgtctgccacaaagcttcttcagaatgctgatccaaaaaagtttgccatttttgacgaatcgtaaaattctgttccgcatcttgcgcactacccagggtcatatcgtacagtaacgcctgcaaataaagtcccgttccaccaacaaccaagggcatgtgttgccggccgacgatttcagtgacgagttgttgtccttgctgttgaaagtcaaaggcagtgaagcgttgatcgatatccgccacatcaattaagtggtgcggcgcaagcgcctgctcttttggtgtgactttggccgtaccgatgtctaactggcgataaacctgcatcgcatccccggaaataatctcaccttgcaactgttgtgcgagttgtagacttaacgctgttttaccaacgcctgtcggaccaacaatgacgattagcttttctttttccatattttcaccacattaattaacgtattttactagctattcgcgcttaaatacgcgataataaagttgtacttgaatgaattgagacttgaggaggctttacctatgaaacataaatttctaaaaggtttcgtaatcggaaccgtttcaacagtcggcgcgattgccggttcactcttggcatttaagaagaccgtcgttgatccaatcgaagaaaaagaaaatcaaattgaagaaagtcgtcgacgtgctaaccgtaagagccattcagctcaccaaggctaagcgctttgaaaagactgcgtccgttgcctgattggcgacggactttttttgtggaaacgtgctttttaaagctgactcttgggattagcttcgtattgcaaacgaccgactttgtcggtcattaacaatactatgctaatgctcagagtcaaaccgctttaaacgcactctgttttgaaacgtgcgccgccagatatactctttcggttagttacataccgcaaacgatcggctctgccgctcatttacggtatgccactaatcctcagagtatgaccatctgcctgcgcactctataaaaagcccaacagttgactagtttttttcgctagtaactcttgggcttttttggtttaatttaatttctttttacgctttgttttgccggtccaaccagcataaccctttttcaaccatttaatgtcggtgaaaccggcttttcttaacttcagtgctgctcggatactgagcgtaatgcctgcatcatataagtagactggtaagtccatccgtagttcacccatattttgtttcaacattggataaggtaagttgcgggcgcctaaaatgtggcctgcatcaaaatcttttttatcccgtaagtcgacaatttgggccttgcgcattgtttcttcaaacgccgcttccgttaattcgccgcctaagcgtttgcgttgaatttgataatatgcccaatcgcccaagaaccaaagtaaaatggcgatcagaataatattaattactacccatacattaattgtccctaatacaagcatcgataagactcccttataacaaattattgttgatcaaattgaagtgcaagtgaagcagccccgataacaccggctacgtttcctaagtttgctaaacgaatcttagtcgtatttttaacatttgggaatgtaaattcttcaaagtaagcttcaacttgtttacgtaaaaattccccagcagctgaaacaccaccaccgataacgatgtaagcgggattcaacatgttcccaacgttagctaatgctaaaccaaggtagtaagaaacacgatcaacaaccttaacagccaatgcatctgattctttagccatgtcaaaaactaatttagagctgatttcttcaccatcatccaacattgtctttaattttgaattaccagcgtattcttcagccatgtcacgtgcaacgcgcacaacaccggttgctgaagcataagtttctaaacaaccttgtttgccacacgtacattcataaccatgtggttcaactgttacgtggcctaattcacctgcagaaccagcaacaccgtgtaataaatggccatcagcaacgatcccgccgccaactccagtgccaagtgtgacaaaagcaacatcgggttggttttcaccagcacccttccaacgttcacctaaagcagcaacgttggcatcgttatcaattgcaagcttcatgtgtgtgccagcttcgatatcgcgacgtaagtattgggttgtcttccagtttaagttgtaagcaccaataacggtcccttctttactgttaacactaccaggtgtgcccataccaatcccgatgaaatcagcaggtgtcatgttatataaatctaaatgatgattaatcgattcaatgatatccggtgtaatgtggctaccttcatctaaaatatccgtatcgatactccagcgttgttggatttcgccatccattgtcataattgcaaatttagcagttgtcccgcctaaatcaacgccgattaacttcttgtctgtcatttaaacttctcctccaataaattgtgattaaacgcttcatttttctccaaccgatgttcacgcactaaaaccatcttagcatcacgatacactttgccatcgattaaccccgcatcataaacgtgccgtaattcgatactggtgagctcgatatcccaaagtcgtttaccaagatggacgtaaacgccaaattgttttaaaagttgttgtacatcatatagagttctcatcaacttcacctttaacattatacataaattgattaatgattcatacccagaaaaccaaataaaatcatcgttgcaacataaattaacccactcaccacacggttcagcgggttaatcttacccactttaggtgcacccagcgccatactacttaaaaagccgccaagtaccccacctaccattgcgtacaatgcattgtgatcgacaataaattgtaatccgattgttaaaaataaaaacagccaatactggcgtgccacttgtcctagcacggattcttctttaaaggcatcacctaacatcaagaagccaccgaatagccctaagatagctgttccagcagtcacggttggtgtatcgagaccaaaaaaagcgcccgttgtaaacaaactcgccaaactgctcagtatatagatagctaataggcgccagtgtcctaataatcgttcaagttgtccaccaacaaaaaacaaaataaccaaatctacgaagagattcataaaccggccatgattgacagatgccatcataaacccaataatccggccattcattagcatgttaaccgatgtaaagccgttcaaccatacaaccggattcaaaaacatcattgcaaacatcaaaatcgttagtaccatcaaggcatacaccacaatcggtgcgtcttgccaacgttctttaaaattagtcatcttttctcctttagacctgaagaacctgatcgagttggatatcgaattcatcaatggcccaatcagcacttcgttgttgtggtttaagcgctagtgcaacagttggcattggatatttggcgagataacgatcataataaccgccaccaaaaccaacccgccaaccttctggactaaatgctagtcccggcacaatcattaaatcagggattaacacctggctcccagctgtaaccactggttctaaagcaccataggaactcgttgttaattcagtggttgccgttaacgggtaaaaagccatttgtcgctctggcaatgtcttgggcactacaacttctttaccggccaaacgaatggcatcaattaccggctgggtcgccatttcaattggctgactcaacgtgacaccgatgattgttgccttttgaaacacctcggttgccattaacaattccaaaagttgtgcttcttgggcatgtttaagcgcaggcgtctgcgcaagcgtttgtaatgccgcaatttgttgttgccgaatttgctttttagtccgcattcaaaagcctccttaacaaaaaaagcccgagcgcgaagcgccccgacttttgatgtgcgtcactattatttagtttcgcggtgtaaagttactttgcgttcgcgtgggcaatatttctttaattccaagcgatctggattgttacgtttatttttgtttgataagtaactacgttcgtgacattctgtacattccattgtaatgtgaacacgcattgatatagcctccaagctgtaagtaaatttctaaaaaactgtttaattcttagactcttagtatcataccattttttatggtatctgaaaaggttattttggaatatttcattcagtaatgttatttaatttatagaaactcgtaatcatttcacgggctagtaacgtattgtagtgccctttatcagagtttaagttcgggaacacaatggcgattgccacttgcggattatcgtatggagcaaagccaaccaaactagaagtaacggtttcgacttgcttacttgtcgaatcgtttggatcttcacgggcaaatgattgtgccgtcccggttttagcgccaagcgttggtttaatatctttcaaggtgtgtgctgtcccccaagcgttggtcccattgacaacgttgtacatcccttttttaacgacattaaagtaactttcgggcgcatcaactgtgctaagcactgtcggcgtggtcttggtaccaacttggccagctgacccatcgttaccagtttgttgaatcgaatccacaaggtatggtttcattcgttgaccaccgtttgcgatggttgaaatgtattgtgccaattgaattaaggtgtaggcatcgtagttaccataagataaatcaagtaatgaaccattggctggctcgccatattcattgacggttggcccttcgatcccggtggcttcacctggcaaatcaatcccagtcttttgtcctaagccaaattgactgaagtagccacgcatcttcgtaaagatatctgaatccatcgttaacgaagaattgggtacatatttggcatgcccttctaacatcgctaattgcatcatgtaaatattagaagaaacttccaacgctgattcagcgttcaatgatccaaacgtcccaactgggtaaacagatttcttaaccggcgttcctcttaaatagattggtgtatccggtaaggtattattggttggcgtaatcacaccatccattaagccccccataacggtcgcccctttaatagcagaccccatgacgaaggtgtgattaatcaccccgagcgcatcatcggcaatttcacctgacttacgatcgttggattcgccagccattgctaaaatagcacctgttttcggattcatcgccacggcataggcaccatcagaatactgagtggctcccgctgcttttgcctgatcatagactttcttcaaagccgcttccacttgcgtttgataagcttggtcaattgttaaatttaaattactccctttttgccctttaaataagacattacttgagagaatctgattattcgcaccaacttcaacttgtgattgcgacttagaaccatgcaagacactttcgtattgcttttctaaataactggtcccaacgcgatcattacgcgaatagccctgtgctagcaaggagttaacgccatcttctggtaacccttgctcttcagttgaaacatgcccaataatactgcgcattgaatcgccattaggataagcccgttcccaatcggtgctgacattaatccccggcaaactcgttagatgttcactgatttcagcaatttccttatcagtcacatccgtatttttaatataaactgtcgataattgataagccccactcataattttgaaaatcgcagcggcttgtttttgttgctcgtttaaccctttaaacgactttttaaccaattcgattgttgattgataaaccttcttttctggcaactcagaaccatcactggcaaccttcgcagatttaggcagttttgcgttccattttttaagattcttggggttactgaggtagtaatcaatctgatcacgttcagttaacttatccgtcgggaccgttaaatattgggttaacttattgccctctgcatacattttgtctgccaagacattcatattcttcgtataagtaatcgccggtttagcagtattcccaactaagacacggccctttgaatccagaatcatccctcgaggcacgttacctgtaacgattttcttatcagtactgttgaccatcgcttgaaaattagcgccctccatcacttgcaggcgtcccaattgcataatcaacgcggcaaataacgcgaagacaacgaataataggaaatttaagcggaatggaatcagtgatttttcacgattttgtttgttttttctcttaatgattttcacagacggtcagatactccttatttagcgccgctctagtaaaagatggcgccgctctatgcttcaaaaagtcgccaagcgaccttttgagcgattttgtgctgtattgtttaagtttagcaaaattatcttaaacaagctatgccaaatctctaaattcaaacgagattatggtatgcttaagcatagtcattaactggttatattttacagcttttctcagttaaaaacggactagcaacctaatttttagatttttttattaattggaggattaccgtgagtcgattttacgcttttgcacgtcgtcattatacattaggccttagtttcttactaccatttggcattttatttatctacggactacttcgacaagtgttcccttttggagggcaaacaatcctgactgttgatctaggccaacaatacatcgatttttacgcttttttcagaagtacgctattgcaccatcccgaaacttttttttattcctttgctaagggcttagggggcgacatgcttggggtctgggcttactatttgatgagtccattcaatctaatcgtcctattgacaccaggaacttggttgagttttggtgtttggctgcttgtccttttcaaaacaggcgccagtggtcttagctttgcgtactacttaaaatctaacaaactactccatagctggtggttaccgacacttagtgttgtctacgccttatccgggtttgcaattgccaaccagtttaacgttatgtggttggatgcactcgtctggcttccactagttgtcttaggcatcgaccggctctttacaggccgtcacttttggctttatccattgagtcttgccgcactcttaatgagtaactattatatgggctatatggtttgcctgtttgtcattgcttattttgcgtgggcttgtgctcattattggcaaacttggcgccatctatggcaaagcgctgcccgcttcatcagtggctcactcttggccggtttactctcagcctggctcctattgccaacttttttccaattgacgcagagcaaagggcagtacaccattcaaaagattcattggaagttcgaatataatccgcttaagatgctttctaaacttgtgattggcaattttaacttcgaccaaatgccaaaaggcgaaccgaatatattcgtcggcagtctcgtattgatttgtgccatcttgtattttggaacacgcaagattgcctggcaagaacggttagttgccttattagtcaccattttcttaggtgtttcaatgtgttatgaaccccttgatttattatggcacggcatgcaatttccggtttggtatccttaccgcttttcatatgtggttagcttttggctaatcgtgctcgcggttcaacggctccaccagcaccttcgatttagttggtatcaactcttgttgccgtttttaatgttgatggcggcttttggttatactgccaaacatctcaagagcttcaccgcgctaagtcctaatcagattaacttaagcatcgctttcttactgatgacatgcttgcttttactcctgaaaaagccgctcaagcactattatcctttgctcttagttctatgcgtcggtggtgagatggtcaccaacgcgacaatgagtcttaatcaaattagctatgtctcacaaaaagattacgcagattatacagctcatttacaatcagccattagcgcaattccaaataaaaccgcgtttcaacgaattggcaaaacctttatgcggacaaaaaatgacccgatgcaagctgattatttcggcggatctcattttaattcgatgctcgaactgagctatccgaaattcatgggcagcattggcgaaccagctggcgatggcgccgttgccgatactaatcagaccctgttcaccgatgcgttattaggttatcgctactaccttaacaatactagtgggcaagcaacaattccactcagtacgaataagccggacttagcacgttataacttactcaaaaaaaaagatcaaattgcaatttatcaaaaccccaacgcacttgatttaggctttgcggcctctgaaaaagtgcttaaacatcatgtggttgccaattatcccatccttgaacagaaccagattgcggcagacttagtcaattcagcgacagaacagccactcttcacacttcaatttttcaatactgtcacttacaagaatgctaaacaaaaaccaaaactcaacgaaactttcctccgggttgatccgaagaatccagctcacgtcatctataccttcacacccacaacgagtgacccctattacctcacattaggctcaaacctcgaaaaaaatgcggttcaggtctcattaaacggtcacacgctacaacaatacgatactttccgcgatactgtcgtcttaaacctgacaagtaacgcaatcggccaacaacaaaccgttgaccttagcttctctaaaaaggaaatttggctccaaaatattaatttatatagtttgaattatcaagcattgacgcacctaacgcagcaacttcgtgcacatgcattgaaactgaatactttctcaaacacaaccatcaaaggaacgatcaccattcctcaacaaaaccaagtcctcatgacaaccgtcccctatgctgctggttggcatgcaacggttgacggccatccggttaaaatcaaacgcggcttgaagaacttcatcgccatcccgctgaaaaaaggtcaccataccgttacccttaaatactggccaccttatttctattggggtttgacgatttcactaatcagcgccggctttgcaattggtggttattacagctacaaatactaccgccgccgccacttattctaaccatcaaaaaaagccccacgcactcaatttaaaatgagtgcgtggggcttttttgaatctattcagtatccgttcgtgctaagatcagtgtattttcggaatagttaatgtttttgcgtaattcatctgcaagttgccatgaaattttatgttgttccaataactcttgaatcgccactcgttcactcgtgagcgctttgattcttaatttttgtaattgacgttcatagatagcagtcttactccgccccccatttttcatgttttcaatctgattccgataccgcacaataatttgataaataacctgacgattataatgacgttggcgattttcaggctgttttaggaaatacgacaattgtttaattcccgccttagccatttcacgttcagtcaattgccactcggtttcacttggtgatttggtatgccgcggccagagatgcgtcaaaaagcgtttgctgattgaccaagcacgatagacttgtagttgcacatgatgccaattaaaactcgtcccaataaccgataacattacttgtttttgccgtaacttacgtttaccatgccgatagcttttagcactaatggccttttcagcccataataactctaacttctgacgttctccgtcaaatgccacttgtcgcaaaatcaactcttcagcaattaacggtggtagttcgtcacttgtgcttgcttcgctttgttgactctccaaccggcggatcatcaactgatactctgccaataaatctaaagcagcccggttattatcaatatgccgttgggattcgaccatgctcgctgctactttgtacatgtaaatcttagcgtttgtttcatccaataaatcagcagctgcttcatcttctgcggctgcttcggcttcaagatctcgttgcatccctcgcatctcgattggtgctttgacttttgtcagcttaggaattaagacaacggccatcaccagactgacaataatcacgccggccgcaataaagagcattaagccgcgttgaggaaacggtgaaccatccgctaaaacagttggcaccgataataccccggccatcgtaatcgctccacgaaccccagaaagtccagagagcactgcaattttaatgttttcgcggaatgttttgggattcgtctggttggtgtagagcaagtaagctagtgtccagagtccccgcacaatcaccagaatcaaccaaaccgctaagacgaggagaatttcttcactcgtattaatcagcggattatgcacggtattatgcatagcgacaggtaattcaatccctaaaattaaaaagacaatcccgtttaataagtaaacactgattgaccaagtttgttcggtcactaacttcaactccggtaaaaaatcgaggaagatattccgtgatgaatgactgatgatcccagctaccaccaccgcaatcacaccggatgcgtggaatagatcttcaacaattagatagatgataaacggtgtcaccaactgtaaaatcgtatggaacatcacatcttcaaagccttcttgtagcataaataggcgaataaaatgaatgattaacatgataatcatccccgctagtgcgccaacaatactaatatacagaaaatcgcccgcggcttgttgccatgagaaatagccggtaacagcggcagcaatcccatatttaaagctaatcaagccactggcatcgttaattaaactttcaccactcactaagtgcaaaacccggggcggtaaatcggcctgttctgaaatcgattgtaccgccaccggatccgttggcgacaagattgccgctaacgcaaaacttgcagccagcggtaacgccgggactaaccaatgaatggccaagccgccaattaacgtcgttgcaaagacgaggaaaatcgcattcccaataattggtccgcgcaacgcccatagttccttcttaggaaaacgacggccatcgttaaacaataatggtgcaacaaacaccaacatgaaccaatctgtttttagtggaatcttgacggcaaatactaacgccaccattaatcccaacccgatctcaattaaactaaccggtaaatttggcaaataatgcccgatgatattggcaataatcaccaacgtaattaacaaaataacagcttcaataattgccatcccaacaccctttctttttaaaacgctcatcctgataaaaaagccctgataaaatcatcttttaccatagcttttcatcattgatttaaccttgcttatgttgcccaataatccggacttctggttctaagcgcacattaaacttcgcccagatcgttttttgaatgtattcgatcaacgtcaaataatccgttgccgttgcgtgatcaatattcacgatgaacccggcatgttttttagaaacttgtgcgcccccaatttgatgcccttgcaagcccgctttttgaatcaacggtccgacaaaatgaccgactggtcgtttaaagacactcccacatgagggatattctagcggctgtttggcagcccgcaaagcgttgacctcatccatccgggcgcgaattgttggtgccgcacccgttgccatttcaaaataggcaaccaacacaatactgccgttatcttgaattaaactatgccggtaactgaagtctaagtcagcggccgttaacgtctgtacttgattatcgcgcattaaaacatcaacgcgggtcagtacatcactaatttcgccaccatatgcgccggcgttcataaagaccgcaccgccaacactaccaggaatgccggcagcaaattctaagccggtcaaactaccgctataagctgcttcagaggtttgaataatccctgctccagcttgcgcagtcaccaagttaccttcaactttaatctgattcatcgccgttaagatgatgactaagcctttaatgccaccgtcacgaacaattagattactagcattaccgataattgtgatgggtaatgtcagttcattggcactggccactaattgccgcacttctgcaacagatttggggagtgcgagtaaatctgccggtccacctgttttggtaaaggtgtataagctcaatggttctgcttgatgaatctcgattgcttggtttgcttgtaaaaatacttcaacttgacttgtcacaattgtcgttcccctcaaaaaataatctactcctagtttaacaaagacggcttgaattgaacagccaacactttttttgcgtattattgactagaccgttaaaatggaatttagaaatgaggaatcgacaatgaaatttatttcttggaacgttaatggcttacgcgccgttttaaaaaaagactttatgatcacttttaatcaactagatgccgattttttctgtctgcaagaaactaagatgcaagccggccaagttgaattagatttaccaggttatcatcaatactttaattacgctgaaaaaaagggctattccggtactgccatcttcactaagcataaaccgctcactgcaacttatggtatcggccaacctgaacacgatcaagaaggacgcgtgattacacttgaataccctactttttatttaatcacttgctacacacccaattcacaggataagttgaaacgattagactatcgcatgcgttgggagaatacctttcaaacttatatcgctaatttatcgactcaaaaacccgtcattttctgcggtgatttaaacgttgcccatgaaccaattgatctgaaaaatgataagaccaatcatcataacgccggcttttcagatgaagaacgagggcaaatgacaaccctcttaaatcgcggcttcaccgataccttccgttatttctatcctgatcaacccgatatttattcttggtggagttatcgattccacgcccgcgacaataatgccggctggcgcattgattatttcattacttccaatgatctccaacctaaattagtcgatgccaagattcacacggaaatttttggttccgaccactgccccgtcgaacttgacacgcaagatttattcgcttagaataagcaaactttataaaaagcgaggttcaaaataatgaattttgtcgcaatggattttgaaaccgccaacggtcaatggcatagtgcttgctcacttgcccttgttgttgtgcgcaacgatcaaatcgttgatagtttttatacgttaattaaacctgaaacttattttagcagtcgcaatacgcaaattcatggcattcatgaagccgatgtggctcaagcgcccaagttcaatcaagtctggccgcacatcgcaccatttttcacgccaaacaagttagtggtcgcccacaatgcgaattttgatattggtgtgttgaaaagtacactccaacactacgacattccagaaccccattatttagcgttggatactctcaagacgagtcggcggttgtatccgcaatttgagaatcataagttaaacaccttgtgtgataacctagcgattccactcgacaatcaccacaatgcactggctgatagtatcgcttgtgccaagattctgattaaagaagccaacgattttggcgttgaaccgctaaaagcggccaccaaattaatcggctaacaaaaaaagagcggttaacttgtctatgcagacaggctaaccgctcttttagcgaatggtggattaaagctaaattgtcattagggcttcgacaagattaacaacttcatcataatcattaatttgttttgactaatgtacgagctttgtttcgctgttaattataccacaattcggttcatcgtgttaacttattttgacttagattgaccaagactcaagataaacaccgtactgatcacgagaatcccacccacgacttcccaggtgttgaaactcgttttcaagaataaaacagtaccgatagtcgcagctaatggttcaaaggtattcaataaaccagccgttgtcggtgtgatataccgtaaactccccaagaaacaaagattggcgagcgcggtcccaaacaaagcaatgaataagacactgctgattgttgccacattcaacggtggaacaccgacccaaaatggatgaacaaatgtgaagaccaccccaccgattaacatcgcccagcccacaatcactaatgttggatatttttggaataacttaaccggaattaatgtgtttaaagcgccagaaaagccaaggcataaactaagtccgaatgccgcgtgtgaaatcgccaaatgtgtcagttgtccttttgtcactaacaaccacgtccccaacaatgcaacagtcactgcaattagttcaacgcggctaggtgctctacgataaatcaccaagctaattaagatgatcatgatggtgcctagctgttgtaaaatcgtagtcgttggtgcattgctggcttgaatcgttagaaaataaaaatactgaacggccgataaccctaatactgcaaataataacatccgcgtaaagtcccgcggttgccgccacactgtaaaaacatcgttcggttgtttaatgagcgcataacctaatagaaataggcctgaaagccccatcttaacccccattagccattctggcttaattgccgtgtcagtgaatagccactgtgatactggcccttgaatcccccaaaatattgatcctaatacggctaagtaaattccgcgtcctcgttgttgttgcatcttaaatctcctcatccatattcattaattggcacatttgcacaaccggaatatagcccgtttctggcgcataaaatccggctgctaattgtgcttcggtcacaaaaccaaaccgtttgtaaagtgcaattgcacggtgattacgggcttgtactgttaactcaagccgtcgcggatttcctatttctcgaaccgacgctaaaaggtgcgccatcaaatcagagccaattccgcgatgccacttcgcttttaaaacagcgatactaacttcactgatatgtgttagcccctgttctgtcggactattcacacgaattgccccgacaatttgctgttgatcaaaagcaagcaataatacatcttgttgcgattcaagaatacttgctatcaaaaattcagtaaataatggtgttaaagtggctaactccgctggtaacgcaacataccgtgtttctttagcgaccgcctttagaaagcataaataagcccgcgcatctgctgcttgcgcgggccgaatgtcaattacactagtctgcaaaactagtacgcaccaatgcttcgtagtgagcgccgtgcggatcaagtactaacgtccgaacttgatcatcgctaacatccttattaaaatgaatcgtcaaataatcgctcggtagttcttcagcaataaattgactccattcaaccaccgaaaccccgtccccatcgaaatactcttctaagcctaaatcactggcgcccgtttcttccaatcgatacacatccatatgatagagtggtaaccgaccgtcttgatactcacgaattaacgtaaatgtcggactcttaatatagcggtcaattcccagaccagctgccaagcctttcgtaaacgttgttttaccagcgcctaaatcaccatccaacaacaagacatcaccggcttggacttgttggcccaactgtttggcaatcgcaattgtttgttctggatcagttgttttaaattctaacatgttctgcctcattctaattgttatctgtgtgtcattataccgaaaaaagccctgttcgcaaagtcaaagacgccagcacaatttttctgtgctggcgtctttgttgtcggtcaattagttttgtaatgcttgagcagccgtaatgatggctaacttgtaaacatcttcttcgttgctcccacgtgataaatcagaaatgggttgattcaaaccttgtaaaattggtccgatggcttcgaaattcccaaaacgttgggcaatcttgtagccaatgttccctgattgtaattctgggaaaacaaacacagtggcttgacccgccacttttgaatctggtgctttttggttcgcaacaactggtacgtatgcggcatcaaattgtaggtcaccatcaatgtctaattctggcgcaatttcatgtgcaatccgtgctgcttcttgaaccttcgtgacttcgtctgctttcgcagaccccatcgttgaaaagctcaacagcgcaactttcggatcgatatcgaacaactcagccgtctttgcagattccacagcaacttcagccaattcttgcgcattcgggttaatattgatggcgcaatctgagaataagtaacgttcgttatcgcgaccgcgttgcataatgaaggccccgcttgtgcgttggacacctggttttgttttaataatttgtaatgctggtcgaacagtatcgcctgttgaatgcacggcacctgaaaccatcccgtcggctaagtttaaataaaccagcatggtgccaaaataattaggatcttgtaaaattgtttgtgcttgttcaggggttgccttgcccttgcggcgttcgacaaaagcggcaaccattttttcaaagtcagctgttggatattcttgtggatcaataatcgttatcccgtccaagttaaatcctttagcagcagcgatttgttgaatatcattcgttgccccaattaaaatgggtttcaaaatccgatcagcattcaaccgtgctgctgcaccaataattcttggttctgttccttccggaaaaacaattttaaattgccgattggtaatctttgcttttaagctttcaaataaatccacaattgcaacctccagtaagcattttattattgctaatgtaatcatacaacgtttctaataccgcgacaagtcaacaatggtaacgcttcattattctaccgtgactgtttgtggtaattgccaattaattggccccatgccccattgctcaagggcagtattcgtctgtgagaaaggtttagagccaaagaaaccgtgataggctgacaagggactgggatgtactgcagtaatgaccgcattttgcgtctcatcaattaaccgccgtttatcctttgccgcgtttccccataaaatgaagaccacatgtccccgatttgacaatgcagcaatcgccgcatccgttagctgttcccaaccttgtttacgatgcgaatttgattgacctgcccgcacggtcaatacggtgttcaacaagaacacgccttgatccgcccaactctttaaatagccatgctgaaccggttgaaagccaacatccgtctgcaattctttataaatattttgcaatgatggtgggactttgacccctggtaaaacggaaaaactacacccatgggcttggttcgggccatgataaggatcttgtcctaaaatgacgactttaacctgttcaaacggtgtccattcaaaggcttggaaaatatggtgcatctctggataaaccgtggtcgtttggtattcctgtttcaaaaaggtatggagctgaccataatagggtttggcaaactctggtgcgagaatcgtttgccactcattgtgaataattgttttcatctgctcacctcattaactagtttatcgtgttttaacataagttgctagaagaaaagtagcttgcatgctaagatagaggtaagtttctaataatacgttttcaggaggaattcctttgatttcaattattgcatctgatatggacggtaccttattaaacgacaaaatgcaggtttcagacggtaacatgaccgccattaaagctgcccaagacgccggcatcgaattcgtggtggctaccggccgcagtcgttctgaagccctccccctaattgacagtgatgacatccaacctactttaattacgatgaatggtgcccaaatttttgattctttaggtaatgaagttttgaatgtgccgattgattccgaaacggtgacagccgtcacagaaaatttacgcgaaaataatatttacttcgaactcatgacgactgccggtaattattcagatagcaaagtcagtcgcatccaaaatgtcgctgatttactcgtcaacctcaatcccgatacgagttataaaattgcggttgctttagcagcagcccgtttggaattaatgaatattaactacgtcgatgatcactatcaagggattattaacgatccaacggttaagattcttaaaatcatcgcttttagcacacagggaatgaccgaattagcaccaattaaggcattttgtgaagcccgcggggatttagttgtaacttcctcttcaagtaataacatcgaaataaaccacattgacgctcaaaaaggcatcgctttggccgcctatgctgaacaaagagggattccagttgagcaaacaatggcaattggtgataacttaaacgatttttcaatgatcaaaacagctggcattggtgtcgccatgggcaatgctgtcccaacaattaaggaacttgcgaactatcaaactgcaactaacattcaagacggcgtcgcacaagcgatttatcacgcgattgacttgaatcgtacagctgaaaagaagtgatctttgatgcctattttctacattaaacaccaggctagtgcttcacgtggtgtctcaaccgtgattgacgatcaagaacaaccgcgttatttacttattggaaagcgtgggattcggcatgacgtattcagcctttactcactcaccggcgacttactcggtgaaattcgccaagtcacaattagcccctcacctgactttgaccttttccaaaacgatgaacggattggtcaactcaaaaagatctggggcgtctggcatgagtttatctatgtcaaacaacttaattggttaattatgggagatttaacgcaaaatcaatatcgcattatctaccatacacaacccatcatgcaagcgaccaccattctagcaagcagcggtccagcctttcaattgactgtcaaccaagaaaaggatatcgtcccctgtattttgattgccgccgttttaaatcattgggcctataaccaacccaaggcactgattcggcgttttaagcctagtttgcgattcgaatagtcagtaaaaaaacgactaatcaaatgattagtcgttttttggtctagctcaagactcccatcgaatatatataagcgctaacatttaaaattaaattgattcttttcttttaaattggtatggttgaatatgcaaacttaaaattaaaggggtcttctcaatgccaactggcgtgattattaattcattatccgtcttatttggcggtctattcggtagtttattgggagataaattatcaactaaatttaaaacagaactcaccttaatcttcggtgttgcttcgatgggaatgggcatcaatgccattattcaaatgaagaacatgcctgcagtcatcttcgcagttgttctcggtactgggattggcctactcattcacttcggtcgctggattgatcgcggtgccgtcttgatggaacggccaatttctaaatttttccgcgtaaaaacaatacgctatcagataccgaatttatttcagcactcgtgacagtgattgtcctcttttgtgccggtgggaccggtatttatgggacattagatgctggtatgacaggcaacaatacgattctaatttctaaatcaattctagatttctttactgctgccatctttgcctgcaatcttggccccgtcgtttcaaccattgcgattccgcaattcattatcttttacatcattttcttacttgccaaactcattttcccactaacgaatccaacaatgcttgcagatttcaaagcttgcggcggcctcttgatgctcgccactggctttagaattgctaaaattcgcgaatttccaattgcagacatgataccagcaatgatcttagtcatgccactgagctggctatggacgacaatgattatgccattactttaatctgaaaagagccgacaacaattgttgtcggctcttttcgtgttaaagctgtttaatcatatgatcatattgatgatcaccaatcattaaatctccttgtttaacaaaacccattcgttcataaagttttttagcgccaggattttgtaaatccacacttaagctaatctttttttcaccacgtgcttttaaataatctggtaaggccttaagtaactttgtccctacaccatgcccctgtgcatgttcagcgacggcaagtgtatctaaataccattcccccggttgtgcttccttatcggtaaagaaacgcgttgtctcaggtaagccgatttgtgggaataacggtgctaatgcatcgtcgatatgggcttccttttcttctgggaagcctacaacaatccccaatacttggccgtcttcttcataaactagtgtgttagcataactataccgatattcaggcattgcaaaggcctgttctaaaataccaaataaatcctccaacggaatcttttggaagagtggcatttccatttcttcaaaaacaatgttaatgattggtaagacactcttggcatctgcaactgttgcttgacgaatcattcaaagacctcctctagtaatctttttatcatacggaggattgcatagcacgtcaactgttatcatgctaaatcagaccggtagtcggccattttcttagcaaataactcaccattggtcggtggcgtgtacgtcaatgcattcgcacccgcttcaatcgtcgctaatatactagcttcgtttttacccccagttgccataatcggaatttcgggatattgttggcgaattgcactaacaattgctggggttttagccgcgccactaacgtttaaaattgaaactccagcttcaatctgcgcggcgtaatcctgtcgttctgacacaacagtacaaataatcggaacgtcaacaacgcggttaatcattttaatcgtctccaccgaggtcggtgcgttaaccaccacgccaatcgaaccggcggcctctgccaataatcccatgtacgcggaccggctgccggccgttaagcccccaccaatcccattaaaaacggggatcgtcgccacattgctgatggcattcatgacagctgggtgtggtgtaaatggataaactgccaaaacagcgtcagcatttgtattattcacaatcgcaacatcggtggtaaaaataattgttttaatcttcttaccgaggatcttaatccccccaacttgtcgcgccacagcaggtggtccgacaacactggtttttaatggtgtataaatctctggtacgaattgctctgtcatccgaatccccctctttattctgttgctttaataatggctactaatcgttgttctagcacgaccaaatcaattgcatttaatcgcgcaaaattgatgcgcaacgcatctgttttaagcccaaataatgatcctggtgcgacagcaagctgatgatcaataaaggtttttaagcgtaatttatggttcggatgggtcacccaaatataataacctcccgctggtaagtaaacgtgccaatcgggtaataccctttcaagcatcttataggttgcttgtgcacgttcttgaagcgtccccttaagttgatccaactgcgtttgaaattgcggatcccccatcgctaaggtcaccatgacttgcgccataatgcttggcactaaatccatttcatgttgcacacgggtcaactgttcgatgacttgcggagtagcagctacccacccgattcggctactagcccccataattttggacaacgaactaatataaataacattatccggatcaagttgctttaacgttgggattggcctagttgtatcaaatcctaaccaaccaaagacatcatcttctacgattggtatttgatgcatctggcataaatgaacaactgcttttcttttttgaaaactcattacgtaccccgttggattttgataatctggattgagaataaccaacttaacacggtgcttaatgattagctcttctaaagcagtcaaataaatcccatcagcatcaactgaagcttcatagacacggacacccgtcgcttcaaacaaagttgagtcatgaaaaaaggagggtgattcaattgcaacagcatcacctggcgtcaataaaccctgtaatattaaaaagagtgattgttgcacaccggcagtcattaataactgctcttcggtaaaaaatagccgtttattgtgttgatccaattgattaattgccgtaataagtggttgatagcctcgtggtgtctctaatgcttgtgcagtaataaaatcttgccacgtcaatgcaggaaattgaaattgtgggactaattctaatggtaagtcacttgaataaacatcaattaacttttcaggttttcgtctaatcagttgttgtaattggcgccgttcattttgactttgtgactgacgttggctgatcaaataagtatgccaattgacccgccttgcctgtggtcgcgcttgctggctgacaaacgtcccgctaccaacgcgacgttcaatcacgccatctgcaaccaattcatcagacgcacgtgtcaccgttgaacgattgacactcaataatttagctaactgacgctctggcggtaattggtcacctgaacttaattgtcctttatctatcaagctaataatcatttttttaattgccatatactttggcttttgttcaggtaaatattgtaaccattcaatcatttttaacacctcttatttagtttacaaattggatggtaaaaaaacaagccaattggctgttgttgaacattctattcttctctatgatagttaagaatagaattttggaggacaactatgcaaaacattctaaccattgccggctctgatactctgggtggtggtggcatccaggccgatttaaaaacgttcgaagccttagaaacgtttggggtcagtgccttaacttgcatcgctacattgctaccagacggtcacttgaaaatccacaacttacctgaggataccattttggaccagcttgatgccattttaaactacgtgccactaacgcacgttaaaattggtttggttcatcaaacggaaactttaaaaggcatctgtgagcgactacgacagcatcctgaattaaccatcatcgctgacccggtcctcgtctttaaagaaggcgccattcttgcgcagcaagcgtacctcgacacgttaaaaaaagaactactgcctttgacgagcgttgtcaccccaaacttgttggaggcccaacaactcagtggtctttcgtcaattaccacgcgtgaggaaatggtcgaagctgctacaattatccaatcatttggccccaagcacgtcattatcaaaggtggtcaacgattccctggtgagcaggccgttgatttattaaaatcgggcgcaacaactcattatttagaagctccacgattggaaacaactaccattgatggcgccggttgtacgctttcggcagcgattgcggcggaattagcacaaggaaaatcgattgaagttgccgtggcacgcgcaaagaaatttgtttatgccggtttaaaagatggtattcatctacgccatggcctggggaatgtctggcagggggctactaaacatgcactttaataaacgtcaattaccattactcgcgatgctcaccgcattgaccgtggcactctctttgttaatcatcatcccgattccggcgacgaagggctttgtgacgctctgtgaggtcggtatttatacaacggcgatcatgctgcgaaatcctggcggactcactgtcggagccctgagtggcctattaatcgatctattatctggttaccctgagtggtgtctcttctcactcatcattcatggggggcaaggcttcgttgtaggtcacctgactcgtaatgattcaatgcgaccaaagcagctgattatccccctcatttgcggtagtatcgtcatggttgccggttactttttagctaccagtttacttttcggctgggctgccggaatcgcttcgattttcagtaatattgttcaaaatggacttggtatcgtggttaccatcccgttagtcactagtttatcccgtattcgaccacaattatttaaccactaggagattttttaaatgacaaacgaattacaattaaaccaaattcaacaagacttaacaaagatgactcaggatgttctaaacgaagcacacttaggaaatggtgatttgttcgtcctcgggtgttcaacgagtgaagtcgtcggtggtcatatcggtaaggcttctagcaaagaagtcggtgaagtcatcatcgcaacacttcgtggcattctcaatccattggggattcatttagccgtgcaaggctgtgaacatattaaccgtagtttggtgattgaacgtcaggttgcccgcgcacacgactttgaaattgtctcagttgttcctgctatgcacgctggaggcgcctgctccgtcgctgcatttgaacaattcagtgatccggttgaagttgaacatatcgttgcacaagctggattagatatcggtgatacggcgattgggatgcacgtgaaattcgttcaagtccctgtccgcccaacccttgatacattgggtagtgcacatgtcacagctttacggtcacgaccaaaatacgttggcggtcctcgagcaacatatgcaccaactcattaaacgcaaaaaaagcctcgttctttgaacgaggctttttgaatattatttattcaaccgtgacactcttagctaggtttcttggctgatctacatcataccctctatgcaaacttgcatagtaagcaattaattgaccaggaatgatccccaataatggtgtcaataagtcgtttacggttggtaaaatgatctgatcatctgcttcagcagattcttcgctgacaatcgtcaaggcttttgccccacgcgcagtcacttcttgtaagttaccacgcgtgtgcgcaatcgttttggcatccattaagaatgcaataacgggtgtcccctcttcaatcaaagcgatggtgccatgttttaattcgccggctgcaaatccttcagcttggatgtatgaaatttcttttaacttcaaagcagcttctaaactcaaggcgtaatcttcaccacgaccaatataaaaggtattgcgtgttgtttgtaagtaatcagtcgtcaaggtttcaatctgttctttttcgctcaataaagtttccatgccagtagcgactaagcctaattcatgatgtacatcgaattgttctgctagcaccagttgattgtggcgtccaagcgcaacagccaagaataattcaactgcaatttgtgcagtgtaggctttcgttgaagcaaccgcaatttctgggcctgcatgcaataataatgtgtaatcagcttcccgtgaaagtgttgacccttggctgttagtgatggtcaagcttggataatgtaaggcattagtttgtaccaacacttggcgactatcagcagtttcgccactttgtgttaaaaagataaagaatggcttttcagataatagcggcatgtgatagccgaattcactagcaacatgtacttcgacaggcttgtgcgttaatgtttcaaacaaggtcttcccgattaaaccggcatgataacttgtcccagccgccacgatatagaggcaatctgcatcattcattgcactgagtaacactgagtcgattttaagctctccatcagcagctacgtattcgttcaataaacgccgcataacagctggttgttcgtcgatttcttttaacatgtagtgggggtatgtgcccttgcccgctgcatcagcatccatttcaacatgatagctttcacggtgaataaaagtgccgtctaaatcttcaatttgaacactttgtttcgtgagtgtcaccatttcacgatcatggatttcaataaaatcttttgtttcattcaacatcgctaatgcatccgagcacacaacgttaaagccatcacctacaccgattaacaatggcgatttattcttagcaacgtataaggtgtcaggatcatcacgatcgaccatgacaaatgcgtatgagccttcaatcaacgttaaagccttccggaaggcttccttagctgataattgttctgtcttagcaaggtaagcaatcaactgaacagcgacttccgtatcggtttgactgacaaaatggacatcctccaagtatgtttcttttaaagctaaatagttagttaacacgccgttgtgaaccaagtaaaaacgaccatcttcagaaacatgcggatgcgcattatcacgactcgcaacaccatgcgttgcccaacgcgtatgaccaacaccgattgttccttgtacttcaggcccaaccgctgcttctagaacgctaattttaccgggttctttaactaagtagtcctgcccagtttcgctgttcacgtaaatgcccgctgaatcgtaaccacgatacgccaacttctctaatccgtttaataaaatttcagttgtcttttcattgccaattacgcctacgattccacacattataaaaatcctcttttcaactttggtttaatattctttaatcaattggtacaacacttaaatataatagcaccaacgattttaatgtcaacatttttattggtatatataaatttataattttggtatagtccaaatattttccgctatctagcgcttttatgctatactaagaccagtcaattttagaaaaggagtttctgtaatgaaaaagagcatcttgttaattcgaagtatttctcttcttggcctattagtcggactgagctttatcgtcgttgcacctaaaacaatcgccttacatattgccgccaataacattgtcgattcaaccggtagtaaatacatgctactattagaacccgctttattaatcatcgtgaatgaagtcagtgttttcaatctcaaacgttaccgcaaaaattatcatttgactgatgcacctatcatacttgtcaaagaatggtatctgatatccgctgctgttgtcttattggttgtctttggttttctgatgtacgaacaagtcacattgcgttagaagaatgggctcttaaataaaattgcaccaaaaaaacccgtcaacacaatgttgacgggcttttttagtttgattcaagtgagaacgtgcttttcaagctagtgctcaaaagttgaccaacttgaacgcgcttctcgagtagtcatttccggtgaactgcaaaatggggattatggcaagaaacaccataacccccattttactgttaatcctcaaagcctaaccaactcgcgtcagcactccctttaattatgcgccaatttcagctttaacaaccgctgcgatttgatcagcatattgatttactttttcttctgttgcagcttcacacattactcgtagcaatggttctgtcccacttggacgaaccaagacgcggccatcaccattcatttctttttcaacggtatcaatggcagcttggatcttgtcatttgttaaccaagcatccttgtccttaactgttaagttaacgagtttttgtgggtaagtttgaacaggggctgctaattcagataacttcttaccagtttgtttcatgacgtttaagagttgaatcccggttaacatcccatcacctgtattgtggtaatcaaagatgatgatgtgtcctgattgttcgccaccaaggttatagcctttttcacgcatttcttcaacgacgtgacgatccccaacgtctgtttggactgattgcatgttgttggcttcaatcgctttatacaagccgatattactcataacagttgtgacaatcgtatcttgttttaaacgacccttatcagataaatattgaccgagaatgaacataatcttgtccccatcaataatattacctaattcgtcaactgcgatacaccgatccccgtcaccatcaaatgctagtccaacttgtgcgcctgtttcaagcactcttttagcaacattttctgggtgtgttgaaccgacaccatcgttgatattcaaaccatctggatgggttgccgttgttgtaaattctgtttctagatcagcaaatacgcggctaattaaaccactggttgaaccgtttgcgccatccaatgccactttaatcccagctaaatcatcaggaatcgtgtgttctaagaattgggtatacttcaaagcaccttctggatattcttccaccgtccccagaccagcgccttctggacgtggtaaagtatcttcttcggcatcaataattgcttcaatttcttcttcagttgcgtctggtaatttgtaaccatctgcgccgaagaatttaatcccattatagatagcggggttatgtgaggctgaaatcataatgccggcacttgcttcttgaaccttaattaaataggcaaccgcaggtgttgtcaccacgcctaatgataagacttcaatcccaactgataataagccggaaatcaaagattgttctaacatttggcctgaaatacgtgtgtcacgagccaccaaaacctttggccgttgatccttatcagcgtgcttggtcaaaacgtaaccacccgcacgtcctaatttaaaagccatttctgggcttaattctaagttggcaacgccacgtacaccatcagttccaaaatactttgtcatatttaattatctccattcatcctgctaaaatctttagcgttgattattgatttacattggtatttgctttactaccttcacttgagcttgattgactacttgattggctgttacttgaacttgactcaacgggcgcactacttgatgtttgtgccgtactttcagacggcgcttcaacagtattagtagcactcgtattggtcgtatctggagtcaccgtaattgtcaccttaatggcacttggcgtactctcataaatgttgtctggtaaagccactttaaccgtctttgaagttgaactcgtgattgacgataaatcgacactcactggtaacgacgtcaacttggctaaagctgtttgacgaccatacacggtcactgaatcagttgttgatgacagactgtagctgtagccacttttttcaccggtcttttccaaactaatcgggagtgttttcttactcatttgaaccaatatcttaacgttaacggtttgtggtgaaattaaaacatttaacgctttcccattgcgatcaacagcttgcaacaagacttcttcattgatgtcttttttggtgccttcatcgggatcaacagtggctactacttgcgacacagcattcactgctgattttgcaccactgacttcaaccacgtcttgacttagttttggatttcctagactatacccggccgctaagttttctttcttaacattgacctgcacagggaattgctttgtcactttgtgctcaatgtggaccttaatttctttaggttcaatcgtgactttgatatctttattaatccccgtctgttttaacttgacggtgtgatcaccaggacccagcttcgttaaatcgccaatcacgcggaaatttaatgtgttaactgctgatgtgactagcgcattcggcccggataatttcactttgaccttttgtggatagccggtaatgaaataccgaccagtatccgcattaatctggagcggcacttttacggtttccgtgcgggttgctagcatctgtgtatcattgttattcgtctggcgcgtcgtgttaatttcatccaaattgacataaccaaacagtaacaacgctagaaataacgctaaaattcgatagagccatgggccttcaacaaactttttcatcatttctggcctccttttttgaagccatcaacaaattcttgtaagagactcgttttgttttcctcttgggtaatcaaatgcgagttgaagtacttcatataatcatcacggcttaaatcacgcattaactcgttattgcgcgttaatgtgacaccaccggtttcttcagaaacaacaatcgtcaaagcatccgttacttcactaatcccaacggctgcccgatgtctggtccctaattctttgggaattaaattactctctgaaagtggtaggtaagcggccgcaacggcaatcttatcatcgcgaattatgaccgccccatcatgcaatggtgtattcgggataaagatgttaattaataactcccccgtcacatccgcatccaaatcaatcccagtttcgatataatcttccaaaccggtattcatttgaattgtaatcagcgccccgatacgccgtttcgacatatactgaatcgacttatcgagggctttaattaaattattttcttgttcaattttgggattaacgccgcgtcgtagtagcgatccacgtccgatatgttccaaaccacgtctaatttcgggttgaaaaataacgatcaacgcaatcacaatccagctgataaattgatccataatgtacgaaacagttcgtagaccaatgtaccaactgataaccttaatcagcgcaatgactataatacctttaaacaattggacggctttggtaccgcgaatcaacatgattaatttatacacaaaataccagacaacgatgatgtctagcacatttgcgagcatccgccacgttaataactgtgaccattcaaatgacataggtaacctccatccaaaaaaattctgtatctattataccatgaaccatttcaatctgctcattgtacttttaatgttgcattttaaactctaaaaataaatcattataacggccaaccgcagttggtgataaatcactataaacttgcaagcgatcgatcaccttttgacttggataatagcctgggttattccgtgttgctgctggcaagagtgctttggccggtatattgggcgttgaataaccaatatattcagcattttgagccgcgtttttgggctctaacataaagtttaagaaggcataggccgccttttcatgttttgccgtcttgggaatcactagattatcaaaccatagattgctgccctcttctggaattacatagtgcaaatggggattattatccaacatctcggcagcttcaccggaccaagtcacagcaacactcgcttcattttgaaccatatacatcttaatttcgtcagctacaatcgctttgacatttggtgccatctgatcaagcttgtccttagccgcctttaaaaccgccggattcgtgctattgactgactggccattttcgatcaagcccacggccatcatatcccgagcactatcgactaccataatttggccgcgataatctggtgaccatagatctgaccaatgtgtcagtggttttttaaccaattgatcgttgtagataatcccgagtgtgccccagaaataaggcaatgaatacttattcccaggatcaaatgattgattcaaaaaatccttgccaatattttgatagccggttaagcgacgatgatcaatcggtttaagtaagtgtgctttgcgcatcttttcaatcatgtactcacttggcaccgctaaatcgtaagcagtcccaccctgcttaatcttcgtgtacatcgcttcgttgctatcaaacgtctcaaccgaaacgtgataaccagtttgcttttcaaactttttaataagtgctgggtcgatataatcgccccagttatataatgttaatgtattatttttcgtataaccttgtgatttttgtaattcaaccgtcccaaaccaaagggctgcacagaccactaaaatcgctaaagtgatgcgtcctaatttattcattttaagcccccgctttccgtttacgccgtgctttttgggcttggcttctttgattcaataaatagtagccggccacaaggattaaggagaagacaaacatcaaggcagataatgcgttgatttctagactaattccttgacgcgctctggagtaaatttcaacggagagcgtttcaaacccgttcccagtgacaaagaaggtcacggcaaaatcatctagcgaataggtgaacgccatgaaaaagcctgcaaaaatgccggaactaatgtacggtaaaataactttactcaggacttgccagtcagtcgcacctaaatcacgtgccgcatcaactaatgctggccgcatttcatttaacttcggcaaaaccatcaagacaacaatcggaattgaaaaagcgatatggctcagtaaaactgaaccaaagcccaaaccaaaacctaagaacgtgaagaaaattaaaaaacttgccccgataatgacatcgggtgaaaccattaaaatattgttcagcgataaaatcatattgcgcacacgccgttgcttcgttgaataaatccctaacgccccaaacgtccccacaatcgtcgcacataaagatgatagaatcgcgattaataacgtttgtaacacaatttcaatcatccgagtatcttcaaacaaggcctgataatttgcccaggtaaatgccttgaagccattcatattatccccactgctaaatgaatagaaaatcaaatagaaaatcggtgcgtacaataagacaaagataagcactaaccaaacgttttgccatttcatttttttcatttgttagtcaccttcttctttgctttttgctccccggttaccagcatgattaagcccatggcgacaattaagaccaccccgatggtcgagcccattccccagttcattgttgtgaggaagtgttcttcaatcgcagtccccagcgtaatcacgcggttacccccgattagacgcgtcaacatgaataaggataacgatggaataaagatggcctgtatcccggctttaaccccagccattgttaacggtaagatgactttcgtaaaggtttgccaattacttgcgccaagatcacgacttgcattgaccaatgatggattcaattcttctaaactattaaatatcggcaaaatcataaacggaatttcaatataggtcgccaccactaagaaactgaaattcgtaaataaaatctgttgtggcccaatcccgaaccaccccaaaaaatgattaatggcaccatcttgactaaaaatcccgataaacgcataagctttcagtaataagttaatccatgtcggtaaaataattaataatagccaaagttgtttatgtttcgtttgatgaagccaatacgccgtcggataactgattaatagcgtaatcagcgtaattaaaaaggcgtaccataacgaatttaatgtcatcttcaagtaagtgcctgactggaaataggtcgtgtagttgaccaatgtcgcatgcccattgatatcaaagaaggactggtacacaatcaatgcgactggtgcgaggacgaacaaaattagccagagggcatatggtaagtaatataaccattgttttttacgcaattgccttagtcctcctcttcgtaactttcaagtcgtgcatcgaaatcttcttctgattccccaaaacgcatgatgtgcacgtcttctggttcaaagaataagccgactcgttgaccatctttagctgggttagttgaatgaatcaaccaccggttttgatctgcatcataggccgtaatttcataatagtcaccacgaaatagctgcgtatcaaccgttaccactaattggccttggtcaacggcaacaatgtctagatcttcaggacgaagcaccacttcaactgcttcgttgacccgcatcccggcatcggcacattcgaactgcttgccgaccatttcaacttgataatcagcaaccattttacctggcagaatgttactttccccgataaaatcggctacgaaatggttgatcggttcgtcataaatgtcgacaggtgtcccactttgcaacacgcgcccttcgttcataacaaaaatttcatcactcatcgctaaggcttcttcttgatcatgcgttacaaataagaacgtaatccctaatcgttgttgtaaatcgcgtagttcatattgcatatcttttcgtaatttcatatcgagtgctgatagaggttcatctagtagcaagacttttggttcattggccaaagcgcgcgcaatcgctactcgttgttgttgcccacctgataactcactaatttcgcgattctcatatccggcaaggcgcaccaatttaagggcttcaatcactttttctttaatcgctgcttttttaactttacgtagatttaacccaaatgcaacattctcaaagacatttagatggggaaacaaggcataatcttgaaaaaccgtattgacttggcgcttattggccggtaaatcgttcatcttctgcccttcaaataaaacatccccggcagacgcattggtaaatccggcgataattcttaaaatagttgtcttaccacagccagacggcccaagtaaggtataaaacttacctttttccaacgcaatgtcgatgccctttaaaatttggacatcgtcgtattctttaatgacatttttaaattccaccattggttgttgcatcttcttcttcgtcccctttatctttagcactctcagactcgttattagttgactaatatcctattaattataccgtttccgagacgcaatgccaattcaaagcgaacattgttgtataatggagttaaataattatttagaaatgaggttgtaatcatatggtcgcctatcaagcactcgttttagaacaaaccgatactactgtcagtgccacttatcaaactaagttaacgccagacctcgctaaagacggggtgttagtcaaagtcgcctattctgatattaactacaaagaccggctcgctatgaatcctaaaagtggcgtcttacgtcactaccccatgacacctggcgttgattttgctggcgaagttgtcgaatcggataatccgttctttgaagcgggcgatcaggtgttatgtacgggttatgaaactggcattacaatcgctgggggctacgctgaatatgtcaaagtccctagtgaatggctctttaagttgcccgaaaatcttagtcttgctgaaacgatgcagtttgggacggccggtttcaccgccgcaattgcgctcagcaaattattacgccaagcctttacagccgatcatgactccccactcttaattacgggtgccactggcggagtcggaagtttcgcacttaccatcctcgcgcagcttggcttcacaaatctaacggcaactacgcgtgacttgcaacaaaccgattatttattgcaccttggtgcgacccatgttattaatacagctgacctaactgctggtccgcttaaagcgctcagccatcagacattcaccggggttattgatacgcttggcggtcctgttttagcccacatcttaccgcaagtttgtgccggcggattcgtagcaacttgtggcaatgccgctggtgcaaccctagaaacaacagtgatgccgtttattctacgtgggattaccttagccggaattgattcagtctattacccacgcaaagaccgtaaagaactctggcaattactcgccacgacgtttaaaccggaaatttggccaacagttaacttggtcgccttttctgatttagcccgagaacttagccagaagacgcataaaactgggcgcgtactggtcgccttttaacccaaaataaaaagccccgctaaatgatttggcggggctttttatcgtctaacgacgttcaaattgatacttaggttcttcaagctctggatcgtaatcaacctgtaaatcataatcggcaaaaaaccattcgtccgattgactcgcaaaataggtgataccatctttaacaaccgaaccaattggctgctcaacagtagcgcgttccatgcccaatgaaaagccatcatgcacggccgtttgaccatacactttgccaaaaaagcggactgcatcccccgattgtaaggctaattcgtcgcgaaaccattgacttgctgcatctgacacctgaatttgcatgttgaactcctcctgattaatcgactagttggttcttaatcgcataaattgccgcttgggtgcgatcatccacttgtaacttcgccaaaatatttgaaacgtgcgtcttgaccgtttttaacgtaatgaataattcatccgcaatctcttgattactacggcctttggcaatcaagcctaagacttcacgttcgcgattagttaagtcttcatatagcttaggttcagccggatgtgttaagcgattcatcatcttattcgtcacttctggctctaaaaccgattgtccttgcgccgttttacgaatcgtattggcaatttcctcggctgtagaagtttttaatatgtaactggccgcaccggcttcaatcgccggataaactttctcatcatcgataaaactcgttaagataatgattttggcttcaggccacgcctttaaaatcgttttggtggcctcaatgccatccatctcaggcatcactaagtccattaaaatcgcatcaggacgtaatgcaagcgccttttcgacaccttctttaccattgacggcttgatcgacgacatgaatatcgtcttgaacccctaaatacgttgagatgcctaatcgcaccatttcatggtcgtctactatcaatacattaatcacttaattggtctcctttaatagtggcactcgaatttcaacactcgttccctggttaggcaaactaataatttttgccgtccctccaacactatgggcccgttcgacaatgttgtttaacccataactgccggctttttgctcagcattcgtatcaaacccggtcccgtcatcaattacctttagtaaaacactctgaccgagttgtttcaagtatacttcaatctcttgggccttcgcatgccgtagtgtgtttgacagcaactcttggacaattctaaataaattatcttcgatgccacttggtaacgttatgctatcaatgtcccatgtaatctgaatcgcaattttggtcttcaattcgttcaataactgaatgatcccatcgcgtaaactcttgccttccaaattaactggtcgtagatgcaagagtaaggcccgcatttctgattgagcctcatttaacacccgttcaactgtcgttaaggactgcaacatctgcgcgttatcagcttgtttttgcgcaacttcactgagtgccgacaacatcatcgtcgccgcaaatagttgctgactcactgaatcatgtaactcgcgtgctaaacgatgccgttcttgcgctagaatttcttccttggtttcaccagcaatcacggtcggccgatcactataactttgaatctcttgttgtaagcgtatcattttttggcgtaattgttcaactgtttgctcgattgacatcgcgtagtcattggtttcgctctgtctaatctgaaaaacaggcgattcatactgtccagaaagtaaaaattgtaactggctttcagtatgggataattgcttacgtacgacaagatagacgattgcggtaactaaaaagcctactgccattgcggccaccacaatataaacaatcagtggtacatagaataattgcttcgtggccaaactaatcagccattgttcctgatgcgtactgtagaaatacgcaaaaaataacgccactgaaaacagaagcgtcaacaaactcgtgctgatccatataaagctccgcgttaacttgctcatactaagatcacctcaagatcaccaatcattacgttggtaatgattttaaggtggcgactttcttcatcatagtttgtactatacaactgaatcgactcatttttcaaattatagtgctgattgtcgattgtcacactccctaacattgcagagtgatcaagatagacaccggtcccgacaggcactaaaatccgtgtctttccaaaccccttacggatgacaatatggttgtcattcttgggtaaaatggtgctccctaaatcgataattgtatcaccggcagcgaccgcgaagttaatatcatcccattcaaaaatgttattgccaattgtctgatgaccaaaccaactatgccgcttgactgttgtctttttcgcggtgggttccgtcgtattaacgggaataaattttttcttgcgccaaggggcattatcaaacaactgattcatattgcggctgctaaactgtcccattcggctatgatttaaggctaaaaagacgaccgcaacaataatcattaaccataacgagaaattaattaacagtggtaccgtaacagctacgcaaccgaccatcgttaacaaagtcgtccagacaccgattttacctttactacgacgtttgttggcccagactaagagtaaaatacctgcaatgatgaacactaaatttgcgggtatcgtaatcatctgccaaatgaacgtcccgaagataatcgcttctattattaaaaaaacgcgccagataaacggcatatttacggtcccctttcaactgattaatattattatacaagcaaaccagataaacaccaatccgtctcaaggctgattaacgaattaacggcaaaataaaaaagccacgggattgatttccgtggcttttttgaaacgtgctttttggctgcaacaacttctgcttaatctaaaattggcagtcatcctaaaatctggatgactgccaattttgtattaatgctcagttgctaaccgcacccaaaagcactctattcttaaacgtgctttttcgaacaaccttttccggttaactacaaaacgggcgtcatggtcaaaattcgaccataacacccgtttttacgttaatcctcaaagactaacccgttcgaaacgcactttatttaacttctgtaattgtgacgtgcatgtcgccgcctggtgtttgcacagctactttatcaccaacgtgtttgccaagtaatgcttgggcaattggtgaatcatttgaaattttaccactgaatgggtctgattctgcagcaccaacgatttggtaagtttcttcttcaccatcttcgtcgtctgtaaagctaactgttttaccaacagcaatttcatcagctgcgatgctatcaacatcgattacttctgcaaagcgtaacatattctcaacttctgcgatgcgtgtttccaatgagctttgttcatctttagctgattcatattcagagttttctgataaatcaccaaagctccgtgcaattttaatccggtcaatgacttctggtcgttttaccattttgagtgtttctagttcttcggctaacttttctttgccttctgcagtcattggataagttttttgtaccattttatccacctctttattttaattaataatactgactatcttaattactgtgtacgtccttgtcaaatctcaatctttaatcggcatttaggattgattgaatctttgttacaagtaaatcaatggccacgcgattattgccaccttctgggacaattaaatcagcgtaacgcttggttggttcaatgaattcatggaacatgggttttaccgtcttaagatattggccaaccacatcatcaaacgttcgaccacggctttccatatcgcgatgcatccgtcttaataaccgaatatcatcatcagtatccacataaaccttaatatccatcaaatcccgtaaccgggcatcagccaatacaagaatcccctccaagataataacatcttgcggttcaacccgttgaatttcctccgtccgattatgaattttataatcatagaccggttgttcaatggcttgatgattttttaacattgatgcttgttcgattaataaatcgttgtcaaaagcatctggatgatcataattcgtttgttggcgttgttcaaacggaacatcttgccgtttgtaatacgcatcttgtggtaataacatcactgagtgattcgcaaatttttgggcgatagcctggctaacggttgttttcccgctaccggacccgcctgtaacgccgataatgatgggtgcttttttttgactggacatgggacgctccttttattctcaacttctttttgggcaaacagaagtcgacctccaatggcggtcgacttcgataatcctaaatgaacctaatcttcaatcgaatctgttgtatcgttatgttgttcgaaggttcttgagtaatatactttacctgtcttcaagttagcaacaaagtagagataattttgatcacgatcagctggattcaagacggctgtgacagactgtaaactaggtgagttaaacggtcccgggccataacctttattgatatataagttatatggtgaatcgactttagtatctttgttataaaggtgtgtcttgtgggtatttaatgcatacattactgaaatatcagattgaattggcatatcgatgtctaaacggttaaagaagacaccggcaatcttttggcgatcgacggctgtgaccccttcacgttcaaccaatgaagctagcgttaacgtttgttgaacggttaacttcttatccttaatggttgcataataaggttgcatcttttgatccatcgttgaaaccatttcggtgataatttcttttaatgtactatctttataaacttcgtaagtggctgggaaaaggtacccttctaagtgatagcggacatccttttgagccattgttgatgacaataatgcagggtatttcttctctaaacttgctaagaattgcttatcattcgcttgtttgatgaaggctgctttagagaattttgtttgtttaccaacttcggccgcaatttcttctaaagtgaccccttctttaactaacaatttgcccttcacatcgcgaggacgggctggtgtgccttctttttgtaagttagagatgatcttatctaaccccattgattgtttcaacacatgataaccggcttggaaatccgagaaattatgagtcttcacataataattaaagactggcgcgcttcgaattaattttttatcctgcaaaatagcagcgatttgtttattcgttgagccgttgggaatgcgcacggtaatttcttgttttgctttggtgtcgtatggtttaagagatgcttgtacgtagcgatatcccatgaatccaataatgacaacaagcgctaatagaataccgataatccaatagacaattttatttgctgcttttttttctgcacggcgttcttcgtacaatgattgtgccgctttttcttgatttactggctccttttgatcaactttcttcaaaggatgacctcctaattgctcttttaaatacaatccttaaaacattataccaaattattcaaaaattgcattaaagattcgagattaacggattttggcatcaaaagtagcaactaattcagcgactactttttcaaaagcagcgttaacttcttcttctgttaaagtagctgcctcattgaggtacgttaaggtgtaagccattgacttctcaccagcctcaatatgactccctgcgtaaacatcgaaaagttcaactgaaactaagtgggcgccaccctttgctttgatggcttcaacaattgcggcatttgaaacttgatcagacacctgaattgcaatatcccgcgttacttcagggaatttaggtgctggtttagcaatcactgtttgggttggcaaggctaggatttgtgctaaatctaattggaaaacataagtttcttttaaatgattagctttcgcaactgctggatgaatttgaccaacaaatccaaccagttgttcaccaacgtaaatggctgccgttcggccaggatgcatttctggataagcttgtgttggttgataactgattgcatccgctaagttgtaacttgccatcaacatttcaaccacacctttgattgtgtagaaatcaactggtgctgcggcagcttgccaagtcttcatttggcgattgccactcattaagccagccacatattcaatttctgttggccgaacttggtcgtctgcttgttttaaaaatacccgtccttgttcgtatagtgcaagatcagtttgtttacgtgccacattgtaagcagcatcgtccaataaaccagtaatcaagttcatgcgtaagtgcgcatgatcttgcgtcattggccaatcaagtgctgtcagcgccgaatcaacaagcgtaaattgacgcgctttttcaggggtcgttaatgcataactaattgcttgcgttaaaccagcaccttcaagtgtatgccgggttttacggagtgccttttgttcagtcgttaatgccccggttgtcatatcgccagttggcaatgtgcttggtaagttatcgtaaccgtataaacgagcgacttcttcaatgatatccgcttggatttcaatatcccaacgccgtggtggaatcgttactgttaaatgattatcagtattgaccacactaaaaccaaatcgttctaataattcaataattgtttgcgttgcaatctctgtgcctaagacgcgattaatccggtcagcttcgatttcaatcactttgtcagttggcactaagttagttgggctaactgtaccagcagtcacttgcccattaccaaggtctgccatcatcatagcagcagcatctaaggctgtttgaacatcagcaacattcacgcctttttcaaaccgtgatgacgcatctgaacgcaagttatggcgttgagccgttttacgaactgcagttggtgcaaaaactgcggcttcgataatcacatttttcgtatcagcagtaatttgtgagttcaaaccacccatgacccctgctagcgcaattggtcgatgaccatctgtaatgacgatatcttcatttgttaagtcatgtttgccttcatcaagggtcgttaatttttcgcccgtcttggctaaacgaacttcgatttgtttgtgatcacccgttagagcatccgcatcaaacgcgtgtaaaggttgcccatacgttaacatcatgtagttcgtcacatcaacaaggttattaatggggcgaatgccagcattccataaacgcgtctgtagccacattggacttggttggacggtcacgttttgcaacatacgcaagtgataacttggtgctaattgttcatcagcaacttgagcagtcaattgatcagctgtttgaacgttgctttcagtcactacgatatcttcaaaatgaggtgtcaatgattcaatggcggccacttcatgggccacaccgtggatgccaagcgcatcggctcggttagcggtgaggtcaagatcgataatgtaatcagtcatcccaagtgcttcataaacttctgtcccaggttcaattgcttctgggaagacaaagatgccatcaacatattccttaggcacaacgctatcggcaaagccaatttcttgtaagccacaaatcatccccattgaaaccacgccgcgcatcttgccttttttaatcttaacgttgtcagcaatccgagaattaggtaatgcaacgactacatattggccagcagcgacattgggtgcaccacaaacaatttggaagggttcatcttcaccaacatccacttggcaaacattcaagtgatcagaatccggatggggttcacaacttaaaatatgtcccaccacaatttttttcaagcccgcgctcttttgcgcgacatcagccacttcaatccctgttcgggtaattttttcagccaatgcctctggggcagttgttaaatctaaataatcttttaaccagttgtaagaaactttcatggtctagccctcctgtgtgaattgatttaagaatcgaacgtcatttaagtagaagttccggatatcatccacaccatatttcaacattgcaaagcgatcaaccccgagcccaaaggcgaatccaccatagacatctgagtcgacaccgccggcttttaagacgttcggatgtgtcatcccagcccctaaaacttcaatccagccagtttgcttgcagacattacagcctttaccatcacaacggaaacaagaaatatccacttcaacagatggttccgtgaatggaaagtaacttggccggaaacgtaaatcacggtcttcaccaaaaatatggtgaatcgtgtattctaaggttccctttaagtctgccattgtaatgtttttatcaatcacttggccttccatttgatagaattgatgcgaatgcgttgcatcatctgtatcacggcggtaaacacggccgggactaatcatcttaatgggaccattagcaaagtcatggttttccaagtcacgtgcttcattgggtgacatgtgcgtgcgcatcaataaatcattagtaatatagaacgtatcttgcatatcacgggctggatgattagctggcatgtttaacatttcaaagttatgtttttcatcttccacttcatagccagcaacgacttgataacccattccaataaataaatcttctaaatcatcaatcacttgagttaagacatgcggggtcccttttttgaccggttggccaggtaatgtaacatctaatgtttcgtgagccagttgggctgctgccttcttggcttctaattctgccttccgggtttcgattgcttctgccaaatcactcttgatttcattagcaaatgcccccaccttaggtcgttcttcattacttaaatcacgcatgccgcgtaaaacttctgtaatcggtccttttttaccgagcacttccactcgaatttgatttaacgcctctaaatcaacaactctttgaatttcttgcagactcttttgctgtaagttttctaattgttccttcaatgacattgcaattcctccttatttttttcaacaaaaaaagcccgtccctcaaaaagggacgaagcttcgcggtaccaccctagtttacgaccattccagtcatacactcaagtttgcgctaacgggcaataccggaccaatggtcaactcagaaagtgaatttcacctaaacttagttgaataacttgcagtcaactgattattctccctgaaaactaatgattaggttactctttttcgtctttgtttaataattgtattttaacgtaaataaccgcaattagcaactaggcttctgtcgcataccagtcgtttgaccaatcgtgaatagcagccattactggcgctaattcttcacctttagtggtcaatcgatattcaatcaacgcagaatcatcactggtaatccgcgcaacaatgccttcttgttctagttccttcaatcgttcaaccaatacgcgatcactgcacttaggcacactgtgcactaagtttttaaaccgttgtgccccgttttctaataggacatcgataatcaggccgttccacttcttacctaaaattgaaaaagtcttttcaaatttaggacacagttggaaggcctcttgacagtcagcatttgcgttttcttttacaatcaccattattttcacctcacacttattaataagaagtgtactgaaaaaggttgcaaaaagcaacctatcagcttgaagcatctttacttgttaattgccggtgtttggcggagaactttttgtttaaatttcgtccacattggtgtacaaaattccgtcacagcacaataatcatcgactatcgatacaatgtaactttccttatatttcggacgactaacagttgcgccccacatgtgtttaacgatgatgtctttttctttaggtgagagttctgttaatttttcggcattccgaagcgcaatgcgcggatggatataagcatgtgtgcctaaatcgaacttcgtatcacgccagtcataatagaataaatcatgtaataagcccgcgcgtgcaattgctcgcgtatcaagatgccacttcttggcaagttcataactgcgataagagacgcttagcgaatgttccaaacgatctgaatgatgatgttgcgtatagttcgctaatttttggacttcatctttagctaataaatcggcaattagagccatgtaatccgcgtcatcgtaccattttgctgttgaattcattcaaagactcctgacattttttaaattcaaattctgccacaaggataacagcttttcgttcaaaaaagaagttaaacgccttaaaaagttacgtttgttagaaaaaattaagaattaagcttcaatcaacttgaacattaaaatcccagctgcgactgccacgtttaatgattcagcattccctggaattgggatgtaaatattttgcgttgtggctgctaagacgttttcattcacgccgttcccttcattacctagaatcaaggccatgtcatttgctttaggcacatcttgataactgatggcctctggatttaattccgttccataaactgggacgtcttgcgaattgaatttcttcatccagtccatcaagttaccttgataaattggtaaatggaagtgactgccttgcattgaccgcaagagttttggattatacaagtcaacactgccattgcctaaaacaacgccggcaaagtctgctgcgtcggctgtccgaatcattgtgccgatattaccaggatcttgaacagcatctaataataagtaacgacccgttaatttttctggtaccggtgtttcagacatttcaacaacggcaaaaatgccttggggtgctttagtttcactcaagtgttgcgccacttctggtgcaatttcaaaagtttcatcgtaaagaccgcgcaatgcgcgttcgtccacatatttttcagtggcgaaaacttggcggatgacggccttattttggattgcttcttggactaaatgccagccctctagtagatacgtattttctttacgttggtttttcttaacggttaatttcttagccgccttaattttagtgttttgattcgattgaatgtattccatgttgtgctccagtctatttagtactttctattatacgcgacttagtgggtaaattctatcaagggtcgctttttaatcgccaaatcgggttgaacagcttacaatgaagaggaggtgatgacaatgcaaaatgcaattcaacttgaagtctatggccgcgtgcaaggcgtcggatttcgctggatgaccaaattggtcgccgataaactccatatcacaggtaccgttgccaatcgtgacgacggctccgttaaaattattgcgatgggcccagcagacgcactcgaaaaatttatcggtgctgtcaaagcttctcccacccctagtgggcgcgtcgaccgtgtcattcaaacaccgctcgaaaatgtgtcagcgtgtcataaattttcggttgtcagttgaaaaacctagccccttcaagtatagttacacttgttgaaacttatcttgaaagggctaaatttatgaaaaattctaaacgcttcgcgacactcgcgatgcttacaatgaccgttacattctttctcgctggctgtgttccacaaaaaatgagcagccatcccaaagtcccaaccggcttaatctatggttcatcctataaatacatcgccgtgccgctccaacatattatggaacgcattgctgatgttttcggtggcatcaatggttacggctgggcaattatcatcatcacattcgttgtgcggatgattttactcccattaatgttgaaccaatcgaataagatgacggcccaacaagaaaagacccgtcgcttgaaaccgcaattagatattatccaagaacaacaaaaagcggcaacaacccctgaagaaaaggctgaacttagccagttgatgatgaaggtttataaggaaaatgattcaagcatgatgccaagtcttggttgtttgaccttattaattcaattaccaatcttctctggtttgtatcaagccatccaatactcacctgaaatttcaagtagccacttctttgggatcggtcttgggagcccaaacattatcattactgtgattgcgaccctcttatatgtcggtcaaagtgcactttcattagtcgggatgcctgctgaacaaaagaaacaaatgcaaacaaccgtcctaatgagtcctgcgattacattcttcatttcgttatttgcaccagccggtttagcactttatttcttagccggtgggattatcatggtgattcaacaattaatcacgacattcatcatcatgcctcgtgttaaaaaacggatcgatcaagaaattaaggaaaaaccaatcgtcacggttgtcacaaaagaaatgttcactcaaaaagcagcagtcaaaccagctgccgacgtcacagaaacaccaacagaaacaagcaacccaactgtcgctacacctaaagtagctggcaaacgcaactcaggtaagcaacggcataagccacaagcttaaccaacaaaaaaaagcggtgcgcctcaatcaattagatgattgaagcgcaccgcttttttaatccgtattaactggttcttctgattttggttctacttcacgaatcagtggtaactcaactctaaaaacagaaccgtagccaacgctactttctagcgacacattcccgtcatagccttcaacgagttgttgggcaattgctaatcccaatccattgccacctttttcccgactccgtgctttgtcaacgcgatagaaccggtgaaagactttcttcttatcttcttccgaaataccttcaccaaagtcttgcacggccacttgcgcataccgctcatcactagcgacggcaatatgaacttctttacgtatcgttgaatatttaatcgcattatccaacagaataatcataatttgttctaagtgatttcgattaacatgcactagcgctggttggtgcaaatcattgtcgagcataaaattaaattctggatataacatctcgaagttatggtaattctgaagaacaacttccccgacatcggtcacttcagtcgttccttcagtcacgactttatctgcccgtgttaaatcaagcatttcttgaattaaatttttcatccgcaagatttcttgtaacgaagccgctaaagattcttccagtacctctggatcatctttcccccatcgattgagcagttgtagatgcccttcaataatcgcaactggtgtccgcaactcatgcgaaacatcactgacgaactggtcttgctgttcgaaataatgctgaattcgattcaacataccattaaacgcactgaccagatcagataattcatcttgactatgcccagtctcaggaattcggacatctgaattaggctctgaattaatggcttctatcgtttttttcataacttcgattggtcgcaagaattggttggctaataaatagccaatcaatgcactaaataacatagcaaaaaagacaaccacaactaacacaattcttaattcagtcatagcgtggttataatcacggacgttattgaccacctctacataaccaattacacggttttgacttgtcttaatcggactaatgccaatcagccgcatcttaccaaaaatagctttgcgctttaatgtatccgtatcgccttttggaaacggaccaatcgccccgcgcgatgcaaacaaacccttcttgtttgcatcataaatcttaactgtaacatcctgttgtgctaaccgcgttaaaaccgcatcttgatagatggctttagggctgtgacggttcggatccaattgattggtgacaaagccttctgtaagatgtggcccattgctggacaatctcgcttgtacgacggtcaccgtatcgtgcacattatcgacttctctgtgtagcaagatattagagatactactaaagatcacaattgaaaaaatcgcaaaggtgataaaaatggccaacccaaccgcagctgcccatttcacctttaacgatattttacgacccttatttgttgttgatgctaccgtttcgtcctgcatcacgagcgcatcacataacccattccacgaaccgtttgaatgtaactttgttcgccagaacgatcaattttatttcgtaagtaacggatataaacatcgacaacattggtttcaacatccgaatcgtaaccccaaactttgctgagtaagacatcgcgtgccaaaacaacgttgacgttttccatcaatgttaataataattcatattcacgtttcgttagttcaatcacatcatcaccacgccgaacaactcggttttctttttcaaccgttaaatcacggtaagtaaccgtcgtttgtttagcagcgttatgttcgccttcgatatcaattcgccgtagcaatgcccgtaaacgcgctaataattcttcaatggcaaaaggcttaacgatataatcgtctgcgccatgatctaacccagaaacacggtcaatcactgaatcacgagccgtcatcataatgattggcgtattcttaacttggcggacccgacggcagacttctaacccgtttaattcaggtaacatcaagtctaataaaatcgcgtcccattcttcattcaaggcagcttctaaaccagtacgcccattgaaatggacctctgtctcataaccctcatgctttaattcaagttccacaaatcgagctaaatttttctcatcttcaataatcaatatgcgactcatttagtcactccccaaaaaagaatttttaatggactctctaaattctaatcaatgataagaattctctaagaaacctcaagcgccaaaatcggcttacctttccattctagcatagttccaattaaataactaactaatctgactctcatctgatggcgatttagtaataatcgaaaaaacacctgcgccttaataatcggctcgggtgtttagagaaacgtgcttcctcgaactgtcttttccggttaaccgtaaaatgatgcttatggctaagaaccgccataagcatcatttttctgttaatccttaaagccaaaaacgttcgactcatcactctattttaaaacgcgcatcccgtcgcagccatttccgcttaatctaaaattgccattaatcctaaaaccgggattaatggcaattttttattaatgctcaatgactaaatgcaatagtcagcactcttgtactaaaacgtgctccagtagacatccgcttccggttagttgcataccgcaaacgatcggtttcaccgctcatttacgatattccactaatcctcagcgcatccccgtctacttgcgcactctattgttctttataccaagtataatggaatgtgccttcgcggtctgttctttggtatgtgtgcgcaccaaagtagtcgcgttgtgcttggattaagtttgctggtaatacttctgaacgatatgaatcaaaatatgtgatagcagctgagaaaccaggtgctggcacaccttgttggatggccattgcagctacgtcacgaacagcgccttgataattctttgtaatatctaagaagtaatcatccaacaataagttgtttaaatcagcttttttatcaaaggcatccgtaatcttttgtaagaaacgggcccgaatgatacagccttcacgccagatcttagcgatttcgccatagtttaatgaccagtcatattgatctgaagcaacccgcatttgttcaaagccttgcgcatagctcatgatcttgctgaagtacaatgcttggcgaatcttttcgattaattcttttttatcttctgttaatttagcaacggttggggctggtaaaatcttgcttgcagccacccgttcgtctttcattgctgaaatataacgtgcataaacagattctgtaatcaatgattgtggcacacccaattcaagggcgctttgtgaactccacttaccagttcctttgttaccagcagcatctaagatgacgtcgacaattggtttatccgtttctaaatcatcttttcgcgttaagatgtccgctgtgatttccattaaataactgtctaattcgccgtggttccattctttgaagacatcagcgatttcttcaacagataaaccaacaacgtttctcaataaattataactttctgagatgagttccatatcaccatattcgatcccgttgtggaccatcttaacatagtgaccagcaccgtttggcccgatgtatgtgacacatggttggccatcttcagcctttgctgacatttgttctaagattggtgcaactaattcataagcttctttttgaccgcctggcatcattgaagggccttctaatgcgcctaattcaccaccagaaacacccattccgataaagttaatgcctgacttatctagttcagcattccgacgaattgtatcgccaaagaaggtgttcccgccatcgattaaaatatcacctttatctaataaaggtaacaattcgttgatgacagcatctgtaccagcgccggctttaaccattaagatgattcgccgtggtttttctaatgattgaacaaattcttcaattgtatagcttggtaccaatttcttttcgctgtgatcttgcatcactgcttctgtcttagcacctgttcggttataaatcgcaacggtgtaaccgcgactttcaatgtttaatgctaagttcttgcccataactgccatcccgatgacaccgatttgtggttgactcatgtaaaaggcctcctaaatgatttctaaatttaagcgttgttgactatcaaaacgacaacgcgtctactgtgtttatgttagcagaattacgctttaaataaaagcattttaactgatttggtccggtccatttaacaaattgggtataaaaaaacgccaaacttagtcggcgtcattgttttgttcttctaataattgtttaagcttagcaaattcaggattgggtgccgtttcttcttcagcctgttgcttagcataggcttcttcagaaatgactgaccacgactgtccggctggcatcacatcatcttgttcttcttctggtgttaggatgtgacttggaatgtgcaagagaatgtgatcttcaacagctacctgtagctctagggcttcgccttcgattgggaacaaaatatcttcgtccgtaaatcgtcccaactgctcgtcttctggatcaacgtagatttcagtgaattcaaaatccattggcaaggctactggatctaaactccgcgttgaaggcactgttaatgtcccgaccacatgtacgcgtgcaattacagcgcgctggtcaaccgttaattcaccgtctactacaaatggtgtagcatctaggacatcagcttctcttttttgtaaactttcttttaacatcaatgtttctttaaacatcaatggatgatcacgatgttttaataatgattggactgtccattttaacaatgctcgtcatcctttctttggttaaaaatcggttggcgggcaaaattctgtgattgccagccaaactgttcttgtaatcgatcaactcgcacctctaaccccagtgggccctcttcggcacccaatttagctgagaccttactgataagtgggtgatcgagcgtttttttcaacgtgtgcaaatgcgcctggccgacttggttaaagccaagcaaatggatgggccgctgcgctaatgattgttcaatatccgtttgttgaatattcaacaggacgtataaacaaacccgttgcaagcgtgcatacgtatatcgctttgttttaagtgcctgtaacaactcggcataccgattgactgaatgaatcacctttttgaaacggtactccaagccctctgacatctgataaatctgccgaagttgggcaaggggtgtactttcaattcggtatttcaatagcggccatagttggtcccaatccagatgcgattgagtctggagcgctgttaaagtcgaatgcggcatcactggggctaactgtgcccagtcatcaccctttgttgccgcctgtcggatagcactggcactagcaaattgtcccgcgccaatcgtttgatcgccgtgttgtgcctgctcacgcttaatcgcaagcaactgcattggcacttcaagttgcgcgttggcaaccgcataactgacccctaagaggtgattgggttgatctaaatttaaatttaattctgcttgataaaactcattgagctgcgtcgcataagttttttgataatcaataaacgtctgtgacttggcctttaaagctaaaatctgttgcccgacttgctgatagtcaaacgttggatattcactgccaaacgctaaggtctgacaaccaagcgccgccaataacttgacggccccatcagcaaaacggtctgcaggttggacagcactggcaaacggcaattcaacgaccatatcagcaccattgctcaaagcaagttgtgcgcgcgtccatttgtccaaaatcgcgggttcacctctttgcacatagttaccgctcatgcagacaatcactaaatctgcgtgcgaagctgcccgcgcctgttgcaattgataccgatgtccattatgtagcggattatattccgcaataatccccgtaattctcatgcgtcctccgcctatttcactgcgctaaagaaccaacgcacactatcttcttgaacggcttcttggccaaaatcagcactgactgatacattcttgaacccagcagcttctaatgctgcaacataatctaccaccggataagttcgttcatggtgtaattcattaagttcttgataaccgtcaatctcgtcatcccagataaaaaagctgagatcatgttcaactgaatgtggtacttcacctgcgtaactcgtccacatgaaggccgtttctgccgtcttatcgttatacataaaacctgggaaaagctcatccatttgataaagtgaatgggcatcaaatagaaattgaccacctggctctaaagttcgataaacttgttcaaaaacttgttggacatgcgctaaatctggcatgtaacagatcgagtcgtcaaaacaagtgaccgcttcaaacgtcccaatttcgcctaagtcaagcatgtcgccttgtaataaaggtaactcgacctcggcttcagaagccttttcagaagcgatactcaacatctcggccgataaatctaagccgacaacctctagccctgcttgttttagcaagatggctaaatcaccagccccacaagctagttctaggactcgatgtttattttgtaacgtctgcaacgtgtaatcccgccattgaccatataatgaatggtccatcaaacggtcatagacggttgcaaagctttggtaaatcattcttcatccaaccattcggaaacatcaacaagtggtgcttgatcccaaagtttttcaaggttgtataaggcacgttcttctggcatgaaggcattgacaacgatatcgccaaagtccatcaagatccaacgtgaaccctttttaccttcgatgtgttttacgaaaacgccattttcttcttctgcgtcttcaatgacgtcaataattgcgcctaattgacgttctgacgtcccagttaacatcacgaagtaatcagctaataaactgatgccttccatgttcattgcgacgatgtcttctgctcgtttgctatcagctgcttgcacagcaatttttaaaatatctaaacttttcactaaagttctcctttatttggcttgagtcggtacccaagcattgtatgtgtcgattgttttcggataaatctgcttcttgccctgaattaaaaaggtcaatgtatttaagatttcataccgcacgccggctgctaaatcagccattgctgtctcacgagcagcttctgcgcccggaaaattgcgcccaggttcgacaaaatccgccacaaataaaatctgatcaatcaaggtcatttctggcgcaccaatcgtatgacgacgcacagcatttaaaatcgtttcatcatggatttctaaatcacgttcaatgaaataagcaccaacaacaccgtgccagatggcattaccgtaattgagtagttctggatcaaagccttgcgttttaatcgcttcaatgaacgtttcatctggtaattgcttagtatagtcatgcactaaaccagcaattgccgcgcgttcaacatctgcgccatttttttgtgctaattgaatcgcggtggcttccacacgcaaacaatgttcaaatcggctttcagataagttagcggcaactttagccactaactcagcccgtgtatacggcacgatgttttcttgataaacaaaatcactcatgatagaggccctctttttgaatgtattcaaagactgggtccggtaacaagtaccgcactgaacagccttgttgaatcttattgcgaatttgcgttgaactgacatcaattaccggtgcgtccacccataagactggatacggcgtttgttgagcataccctgttcgtttaacaccaacaaattggactaactgcactaaatcatcaattcgataccaagtaggtaagtagtcgaccatatcaccgccaatgatgaaataataatcgatttcagggtgttgttgttttaatgccacgatcgtatcgtaggtgtaactgacaccgccacgttcaatctccgttaaatcgagttcaaaatgcgaattgtcagcgatggcacgttctaccattgcaacacggtgttttgctggtaatgtttttttctcatcaacgtgcggtggattggcatctggcataaacaaaattttatcgagaccgagttggctacgaacttgttctgccatcactaaatgaccgatgtgtggcgggttaaatgtgccccccataatgccgacttgcaagcgatggccatcttctacaaccaacacgtccggttcagtcacatgatttgtctgctttagcgttgcactttgcatctgatcaccgccttattagcgtccgagcttagtaacaatcgttgaaatcttttggtatttttctttccgtgaagctttataaatcaccaatgtgcgtccaattttttgcgcaatttcgatgcgactgtcatgttgttttaagaagttggctaattcatcaacggtcacttctgttgtttgtaacaagttaatcttaacgagttctcgtttttcgatggcctcttcaatttgttcgaaataagtttggcttaagccgtttttgcctagttgaaaaagtggtttagtggtttgcgctaaaccgcgtaagtaatgtttttgtttgcctgttaacacgtgcgatacttccttccctaattaaattaatgctttccgaatcatgactgagacacctttaggcgcatatcccgcaaccacgacattttctggtaacgtaatccagcctaacccagcaaacactaaatcactcttttgctttgttgagaattcataccgttggagttctggaaaatcagctaaatcttctggatgtggtggctgtagcatgtcccctaattgcttagcgtagaattgatctgcattttcaagtttagtccggtgaatgtaaagttcattgtcaaaataaccgacaaagccatgccgtgcaccttgaatgaaatcaaaacgagctaacccacccaagaacaatgtttgttgttcatttaattggtatacttttggtttaatccgcttttgcggcgcaatcaaccgtaagtctttatcatgtaaataatgcgccatttgttgggcatgcataatccctggtgtatcaatcaatgcatgatcatcttcatacaatggaatatcgatgcgatctaaagtcgttcctgggaattgtgacgtcgtaatcacgtcgctatctaaaatcccagtttgcttgataatgcggttaatcaacgttgatttaccaacgttcgtcaccccaacaacatagacatcgcggcctttacgttcgcgttcaatcacggccaataattcatcaactgaattcccttttttagcactgaccaacatcgtttcaaccggatgtaagccatgttctttcgcttctttttgaatccaattgatcactttatttgggttaagagcagatggtaagatatcaaccttattccccactaaaatcacggggttatcgccgataaaacgatgtaaccctggaattaaactcccgttaaaatcgaagatatcgacgacgttcacgatcaacgcgtcactgtcgccaatttggttcaataaggctaagaaatcatcatcatttaatttgatatcactgatttcgttgtagtgtcgtaatctaaaacaacgttggcaatacaattgacccgtttccaagccttttttaagcgctgaattaggcgtatagccgagtgcttctttgtccgttgtttggatgcgagcgccacagccaatacaaaatagttcttcctcagtttgttgtgtttcagtcatttaaatcctcccgccaagttaaatctgcgtgtttttttagtagttgttgcataatatatttttcaaagaatcgattaatcgatgtattccaggcatcactgtcaataatgggtttgaccaatatcgtccggacgccagccacattaccggcatgcatatcggtaatcaattgatcgccgaccatcaccacttcatgtcgcgaaaggccaagctgcttcttcgctttggtaatcccagttgccaatggcttgttcgcccgagcaatgaatggtaattgcaattcactgagcgcgcgttgcacgcgatcatggttgttatttgaaacaaccatcacggtgatttcggcagcttgcatctgtgctaaccaagcttttaactgtggtgtgccatcggggttattccacgcaattaacgtattatctaaatccgttaaaacggccttaatcccttttgccttaagttgttctggtgttaagtcgtagatggcattgaccatccaagttggcttgaaattctttagcatgtactgtcccctcgactttaatgtgctttcatcaacagcttcttgcgctttgctacacttatcaaatcggcgcttgcagcgccaactcgctaagttaggcaaatgctcggaagctaaccgtggatgacgcacttcttttctttaacgtgcttttcaaaccatattcctgtgcctagcgacacaagtcaaacgattgcttgcagcaatcattcgccttgttagactagtgctcggagtataccaggtttgaacgcacttcttttctaacgtgcctcagtaggcgtatttttgcggctagcgacgtccgtcaaacgaccaacaagttggtcattcgccagactaggctagtcctcgaaatataaccgcctactgacgcacttctttttaatctagtcactgattaattatagggtatttgacaccaaattgcacctttacgcggttaatttccataatttccaactaattcctaatccatttaaatccataagtcaaactaatcgacttttagccccaactctggtacgtttaaagaaattgagaggatgtgtttgttatggaaaaattcggttttaatcactttggcggccctgacgttttcgaacgtttcgatcagcctcaaccaactccaaaggacaaccaagtcctcattaaagtgctcgctgctggattgaatccatacgatgttgcactacggaatggttcacaagattcagtgcgcccattacccttcccaatctttcctggtacagatgtggttggtgaaatcgttgaacttggtgctgacgtcgatgattaccgcgttggcgaaatcgtcatcaatcaccgatcaatgggtgcttatagcgaatacgtaacggctagtactgcgaagattctccgtaagccagccagcatgagtatcgctgaagcagccggtttacccagtgccggcatcactgcttacaatacgctgatgcacttcacaaactttaaacacggcgatacaatcgctattatgggtgccagtggtgccgttggtagtttactcgttcaattaagcttagcagctcatttaaacgtgattgcaattgccaatagtgctaacctagactatctgcgctcattcggtgtccaagaagtaattgcttatgatcagccatctgacttcgaacgacttgcgcagaccgctaaaatcggtatcaacttaagtcgcgatccagaatcaactgaacgcctcaataacttagttgcaccaggtggcacattcacttcaacgaccatcttaccaacagacgatcaacaacgcgctgacatcaattaccaatctgtctatccgcgtaaggattatgcagatttaaccgccttacaagatttaaatgaattgatcgatcaaggtttactacacaataccgtcttcaagacgctcccatttactttggaaggcattattgaaggccacaagctccttgagagtcatcatgccccaggtaagattgttattagccactaattttataatgataaaagaaagagtctagaacaaaacgaagttttgtcccagactctttttttgatctttaattatttgtttaatgcagctttagcagcttcaacaactgatgtaaatgcagcagcatcgttaacagctaagtcagctaacatcttacggttcatgtcgatttcagcgactcttaaaccgtgcattaattggctgtatgagatgttgttcatacgagcagcagcattgatacgagcaatccataacttacggaagtcacgtttacgttgacgacgatcacggaatgcataacggtatgaaaccattacttgagtatttgctgatttgaataataaatgtttagcgccgcgataacccttggctaattttaaaatctttttacgacgtttgcgcgtcactgttccacctttaacacgtggcataagaatttcctccttgaataacaaacaacgtcaaagcgttgctgtactgatctaatttttgcttgaatccgaaaatgctatggcttatttaaggcctgataacatttgacggatacgtctcatatcgctatttgaaaccattccagattttcttaattgacgacgttgtttcttagtcttgccgtggaaacggtgacttgtgtaggcgtggctgcgttttaggccgccattacctgtacgtttaaaacgttttgctgaagcacggtgtgtcttaaattttggcatgatatttcctcctaataaatcagaaacagattttttatttttggtcctttagcggttctaacattaagaacatgctacggccatccattttaggacgtgctgtaactttagcgatgtcctctgtttctttagcaagtctttccaatacacgttgcccaatttctttatgcgtaattgcgcgccccttgaaacgaatagaagctttcactttatcgcctttgccaaggaacttacgtgcattgttcaacttagtattaaaatcattttgttcaattgtgggactaagacgaacctctttgaggttaatggttttctgcttcttacgagcgtcacgttgtttcttttgaagctcgaaacggtacttaccatagtccataatacgagcaacgggtggttttgcgtttggtgaaaccaaaacaacatccatattagcttgatcagctaatgcaattgcatcttgagtactcttaataccaagttgttcgccatcttgagcaatcaaacgcaattctcgtgcacgaataccatcgttaaccatcaaatcttttgctatgactcttcacctccataaagtttagagagaaaatgcagctaagtaataaaaaaagcggccctctcataacagaaaggcccgcttgttcggttacttagttcgtccgaattagaaactatcagcccagagacatcaagtgtctactaaggcgagaagcgggaacttctgctttatttctcaacgaaaataagtatactcggttaggaatttaaagtcaaggaaatcccgcatttaaatttacgtgtacttagttgccgtaatgattgtccactaagtgcgtggcttttacttcgtcaatgttgtgtgtaccagctaattgcatgactaattctaattctttttgcaagtagttaaagacactttgtaccccttgtgcaccgccaagtgctaatccgtaaatgactgggcgcccgattgcaacgatgtctgccccttcagccaatgctttaaagacgtgttgaccacgacgcacaccactatcaaagacgattggtacccgtttattaactgccttagcaacgacgtgtaatgaatcaaaggctgcagggccaccgtctaattgacgaccaccgtggttggatacccaaatccctttagcaccggcttgaagtgcaatttcaacgtcttctgctgtttgaatccctttaacaaagactggtaaatgtgtgtattcagaaatgaattcaacatctttagggttcaaacgttgtttagctgatttgtagacggcatccattgtttggcccacacctgtttggtaagcttcaacgattggtaacccgactgggaatgtaaaatgattgcgtttatcggtttcgcggttaccaccaactgtggcatcagctgttaagacaatcgctttaacgttatgcgccatcgcttcatctaaaatcttacgattgatatcgttgtccttactcatatagagttggaaccattgcggtgcgccatctgctgcggttgccatatcatcgatacttgctgacgcaaatgaactcatggttaagattgaaccgtaatcagccacacctttagcggttgccgcttcccctttagtattcactaacttatgagctgcaacaggtgccataatgattggtgatgttaagtgatcgccaaagatttcggtagttgtatctggattttcgatatcttgtaaaacccgtggtgcgatgtatttgtgattaaatgccgtaatattttcgttaatggtataaagatcacccgcgccactgtaaatatacccaaagccacccttgggaacaacttcgccggcttctttttccaagtcatagaggttaataatgtccaatggttgctctgctgaacctgcttgatatttttctatcgtcataataacgcctcccattaatcaacgattggaatcgtttacatatttattataccgcttttttagttgtgcgcaattaaaaaaacaaaaaaacgtccgaaatgtcaaaataacatttcggacgttttaataaccgcttataggttgattgttttgtgatctttaccatcgcgactgtagttaccaacttcagcaacgattgcatctacaaacatgtctgaagcttcttcagcagcgttttcttcaccgtatttacggacagaaaccgttgcgtcagcaacttcttgatccccaacaactaatgtataaggaatcttgcttgtttgggcttcacgaatcttataacccatcttttcattacgatcatcaatgcgcacacgtaaaccatgtttgatcatcgcatctttgacgttctttgcataatcataatgtaattcattcttaacgggaataatcacagcttgagttggtgctaaccatgttgggaaagcgcccttgtagatttctgttaagtaagctgtgaaacgttccatcgttgatactaaaccacggtgaatcataactggacggtgcatttcgccatcttcgccaacatattgtaattcaaaccgttctggcaacatgaagtctaattggattgttgaaagtgtttcttcattgcccatagctgtcttcgtttgaacatccaacttaggaccgtagaaagcagcttcgccttcagcttcaacgtaatctaaaccaagatcatccatagcaccttttaacatcgtttgtgctttgttccacattttatcatcagcatagtacttttcggtattagcaggatcgcggtagctcaaacggaatgtataatcgttgatattgaagtctgagtacacttcaatcattaatttcaaaattgacttgaattcatcttgaatttggtcaggacgaacgaatgtatgtccatcatttaaagtcatttcacgcacccgttgtaaccctgaaagcgcacctgatttttcatagcggtgcatcatccctagttcagctaaccgaattggtaattcacgatatgaacgtgggtggtgtttgtaaacttggatatgtgatgggcagttcattgggcgtaattcaagcatttcgccatcgcccatatccattggtgggaacatgtcctcacggtagtgatcccagtgacctgattgtttgtacaaatctaagttcgctagaattggtgtgtaaacatgttcataaccattggcaacttctttatcaatgatgtaccgttcgattgaacgtcggatggtagcaccatttggcaaccaataaggcaagcccgcaccaaccttaggatcaacaaagaataagtctaattggttcccaatcacacggtgatcacgttctttagcttcttgacgacgctgtaagtcagcatctaagtcagcttgtttgttgtaagctgttccgtaaatccgttgtaacatcttattacttgatttaccttgccaataagcgccggcaaccgataagagttcaaagaccttaacgtcgctcactttagctagcattggtgctaacccaaaatcagcaaaatcgcctaatttgtaaactaagacttggtctgtttccatttcatctaataatgctaatttgtaagtttgcccagcaaatagtgttttagcagcagctttgtctaagctgacacgttcgattgccccgccagcttggattaacttgctcattgcttttttaatgtctggtaagtcggtcacagctacttgaccagcttcgttttcggtatcatagaagaagccatcttcagttgcatgtacttcgccgaattgcatctcgggataagcacggttcaacgttgcagctaaaacaaaggctgccgtattccaaattgccatcaaatcggttgctttgtcgtctttagtgatgatttcaattgccccatcttctaaaattggttgctgtaaatcaactaattcaccgttcaatttaccggcaattgcctttttagctaagcttgtactaattgatttagcaacatctaaaagacttgttgcttgttcaaatgccttttgagcaccatctggaaaagttaattgaatctctgccattactattcactccttctaatttgtcatcaacaataaaaaaagtccctgagacgcacgaattgtgcagctcagggacgaattaatttcgcggttccacccagattgagaccccaacatttggttctccaactttaagcgtctataacggaaacgacccgatcagttgtattgcctttgaaagtggtcaattaaatgggggtgaaaaactttcagctatgtttttctctctgcgatggttcatttaaaaggtgtctttcatcattgattgattctattaaaacacttaattgcttttttagcaagcctaaattactaaggttgtaagcggcgattttgaccaccaacttcaatttcttgcgctaaatagcgcacacgttgcatgatgcgggccgctttaaccggttcgtctccttggttgctagttgtcaaatgcgtctctaattcagtcattgtgaagtttgaactgaagaaggtggcgagttgttcttgcattcgatattgcaaaataatgccaagtacttcatcccgaacccacgcactcattgcatcagcaccgatatcatcaatcatcagaatcggtgctttttttatcacgttgaccttttctaacacattgttttgcccaattgcattcttcatctccactgcaaatgtcgggaaatgaatcaacgtggtttcaaacccggataacgccagttcgtttgcaatcgcacctaacaagtaagtcttgccaaccccgaattgcccgctaaggtacaaggcttggtgaaaatcatggggtgcttgccgataagccccgataaacgcggtagctttgatcaatgcgtcaaaccgattggttggatcgtatgaatcaatcttggcctgttcaatatcgcgcggcatattaattgacttcactcgtgcatgcaaggcagcttgttcgcgctcttgtaataaacttaccgtaggctcataactgacatcgataaaatggttatttaagactaactttggcgcataacccggtgccaaagtggtttgcccattagctaacttcttcttttcgatgacgtattcgtaaattttagcggcactacgcgtgaccgtttcttgtgataagcggtctttgttagcttgtataaatgcttggacatcggaatcgttcaaggcatcttcgaccaatttattaaactgttggtttaacttttgccgattcatgtaatccgtcaaatctttacccatattttccattacgattcccgcccctcacgaatttttttcaacgccgcttctagttcatgctgatgctcaggtgtggttgtttcttttggcgcttgataatctggtttagcccatttaggtactggttcttttttagttttattctgataacgcgtttggcgattgttttgcacctttgccgtctgtttggtttggaaatcgcgaatctgcaaaatcgcatccgctgccgtcttaaccccttgttgagcccactggttcgcaatccgatcgactagcgcctgagtgagcccatcatattgcgtaatgatataaacgaccaaaatattgagcacatcattgttaaagatatagcggttttgcaagtcctttaacgcccggatttcatttttagcgacaaagccgtggttcttttgtttcaagtattcgagataatcaactggcaagtagccctgactttctgttagccactgcaattcctgttcgttaaagccggctttttgccattctttttgtaactcggctaacggtttttgcgttgttgtagcagctggcgtttgccggttactctgacgtcgtgtgtaattgttcaagacgttctgttcgagcgctgccatattaatcgtactgtcagcaacattcatcgtcaagccaatcaaacgcgctaagtccatctcatctagaccatagaaataatggagattaaacaagccctgttcatttttgagaatttgatccgtatcaatctggtattgcgccgttgcatcttgtaataggtcccaatcaaaagtccgcaactcaaccgaggtaaactgcggtgtgctagctgctttttgttgatacattgccttagtttcagccacactgcttggcacgttcgtcaataaatcgttttgcacatggaaaacggtcaagaaattcttagtgacctcttgataatccttggcgtaaaccggtcgtagcttgaaatagtcacggagttccacaaaccgtgtttcgcggaccgcttcgaacaatgccacacttaacaaatcatcgttaaaaaaagcttgtggttgcaatggcgcatacagttcatacaccaacttgcggccagttccctcatttttttgatacgtccgcattaaaccaagtgcttccaatttgctgcggctgtcataaaaagcaggtaaatcaacactcaacagatttaacaaagtcgcatgtgtttgaaaatgttgttccgtttctttcttggtttgactccataacaaaagatagagactgtaagcaacagcccccatcaatggttgatataagtaagtgacgactgtttgatcgaaatcggtcaaatagttagcttttgtcactgaaaagccgtcttttggactcaaaaaatcaaatgcatctgacatcggctaacccctcttccttaattcgatttcttcgtcttttctttattcatcatttcttgtaattcactcataaagacattcatatccttgaattcgcgataaacactggcaaagcgaatgtaggcaatctgatcaatatctggtaacaagcgcatcacgtattctccgacggcttgtgaagagacttcgttttcacccaatgagcgaatcttattctcaacttcatcaactacttcagtcatttgctccattgtaacggggcgtttttcagcagcacgaattagcccgcgcaataatttatcacggttgaattcttcgcgcgttccgtttttcttgattaccaacaatggggtttgttccactcgttcgaacgttgtaaaccggaaacgacaattctcacactcacggcgacgacgaatcactcgcccttcatccgtgggacgactatcaattacccgcgaactattctgatgacaatgtggacatagcataatgacaccttcttatcttttgattaattcgtttcaaattcaatccaattttaaaacaattagtataacagtagtataacatgccaggcaagcaggctaaacaaaaaatgtatcagtctcaaggcatttcgccttttccaaacaaaaaagcggtcgaacagaataatctgttcgaccgcttgtattacttgttatgacacaactgttgtaacaacgccaaaacacgttgccgcaacattgcaggtgtgccttgattatcaatcacgaaatccgctcgcgcttttttggtcgccaaatcactttgactatcaattcgcgcatttgcctgttctatagtcaattggttacgcgccatcaaacgttgcaattgtgttttacgttcaacgtagacaactgcaacaccatcgcaatattgctcgtagtgttgttcatataacagtggcacatccaacacaaccagcggtgcatctgctgcttgcatctgttgtttaatggctgtcaaaatagcgggcccagtaatcgcatttaactgagtcaaagcctctgggttaccgaagacttgctggcccaacataggccgatcaacttgaccatttttgacaactgcttcgccaaaggctgcttgcaattgtgcctgtaccgatttattagtcgctaatacctgatgagcaacttgatcagcatcaatcaccgggattccctgttctttaaacaatgccgcaacagtcgacttcccactggcaatgccacccgttaaacctagaaaatacgtcattgaaccgcttctctcttaatctgacaccgcggacagaaatgcgtgccacgctgtgctactttaattttctcaatcggagtctggcaccgatcacacggttgccctttcttaccatagacgtgcaacatatcctgaaaggccccagcgtgacccgccgcgtttaagaacgtattgactgttgtcccaccgttattggttgccagttctaactctgtgatgatttcatcatgcaaacgatctgtttcagctttcgtcaataaattcgccggtgtttctgggtgaatctggctcaaccacaacgtttcgtccacatagatattcccaagacccgttacaattttttgatccagcaacagtggtttaatcgcttttttatgtttctgtaacgcctgatagaaggcggttttcttaaacgttgttggggttggttcaacccctaagtccttcaatccagaaacagtgttttcttgacccgtttcaattaataacattcggccaaacttacgtgaatcaagataacgtaactgttgtccatctgtaaatgtccaaatcacatgcgtgtgcttagtcattggtacggattgatcatcaacttcgtatttgccttccatccgcaaatgactcacaacagttaagttttgatcgaaacgaatcaataaatacttaccgcgtcgatcaacaccgataatttggcgtccaacaagaccttcaacaaaaacatcgtctggattactgataattttcgaccagcgaatctcaattgcttgaaccgtcttaccgaccactaattgttccaatccgcggcgcacattttcaacttctggtaattctggcattgtgtgtccccttatttcttaatatcgtaccaagttggtccaaagccactttcaactttcagcggcaccgctaatgaaaccgcagaatccatgacacttggtactaatttttctaacattggtatttctgattctggtgcttcaaaaatcaattcatcatgtacttgtaaaagcatcttggcttgtaatcctgccttcttcagttccgcttgcatcaagatcattgccatcttaataatatcagcggcactcccttgaattggggtattcattgccgtgcgttctgcaaatgagcgcaaattgaagtttttagcgtgaatatctggtaaatagcgacgccgatggaagagcgtttcaacgtagccttcttcgcgcgccttcttcacgatatcttgcatgaattgatgaacacctggatactgttcaaaatacgcttcaataaagcgtttagcttcagcccttgtgatcccaatattttgtgataagccatagtcactaatcccgtaaacaatcccgaaattagttgctttcgcttggcgccgcatatctggtgtcacttcatcagcgctcgataagccaaaaatcttcatcgcagtattcgcatggatatcgcggtcttccttgaatgcctcttgcatattggcatcccccgaaatgtgggctaaaactcgtaattcaatttgggagtaatcagaagcaaacatctgccaacccggttgacttgggacaaacgcttggcgaatcttacggccttccgctagacggactggaatattttgtaagttgggatcaaccgatgacaagcgaccagtctgcgttaaggtttgcaagtaacgcgtatgcaccttattatcttgatgaattgacttcaataatccttcgacatacgttgactgaatcttagcgatttggcgataatccaagatggtttggacaattggtgcgtcttttttaagttgttccaagacatccaccgccgttgaatagccggtcttggtcttcttaatcactggtaaccccatcttttcgaatagaatgacgcccagttgcttaggcgaattgatgttaaacgtttcgccagcttccgcataaatcttttcttccaaaatcttcagcgtttgactgaactcgccccccatttgttgtaggcgacttgcatcaactcgaatcccggtgatttccatatccgctaaaactagcgctaatggcaattccatatccgtgaataaatcgaattgttgatgtttttttaattgttctgtcaattgtggtgctaatttgtaaatagctgctgctttttgaatcagatgttgataaagcacggttggatcgacaggaactgcgcgtttagcccccttgccataaacagcttcatctgtttggacattttgatactgatgtaaatttgcaaccgttccaagatcattactgttattcgttgtattcaacaaataagacgctaatagtaagtcaaattgaacccccgctaagtgaatccctaagcgattcaccgcaacctgattgcgtttcacgtcaaaaactgctttcggacgtttagcatcttctaaccacgtttttaaaaccgattctgtcaagagtgttacgtcgtcgctgacataccagtggtctggtcggccaatgtaaaagccaatcaagtccgctgtatggtaattgtcggttaacatttcgatgccaaacgcaacgttttcagtggttgtcacgacatcggcgatgttatcaagggttaatactgtaaattgatagtcttcagtagccgtgggttcaactggtgcaacatctaattgatttagaaacgacttgaagttcatttcttggtaaaaagcaaccaaagctgccatatcaggtccgttgtacaccacatcgtctaagccaatcgtaattggcgcgtcacgtttaatggttgccagtgtcttactcgtgaaagctaggtcgcgatcttcaatcaaatgttctttcaatttactctttttcatttcatcgacatgttcatagacaccttcaatgtttccaaattccgtaatcaatttaagcgcagtcttttccccgacctttgtcaccccgggataattatcagaggtatcgcccatcaatccttttaaatcgataatttggcttggttctaaaccgagtttttcttgaacgtgttcaggggtatacgcttcaatttcattgacccctttaacagtgatgttaacggttgtctgactagtcgtcaattgagttaaatcgcgatcaccagtgacgatatcgaccgtgaaaccatcagcttctgcttgtttagcaagtgtaccaatgatatcgtccgcttcgaaattagcgagttcataagactgaataccatatgctgttaagagttctctgatataaggaaattgttccgttaattcaggtggcgtttttgaacggccccctttgtagtcggcaaattgttcggttctaaaagtggttttgcccgcatcaaaagcaactaacacgtgtgttggttcaatctttttcagaataatatccaacatattcttgaaagcataaatcgcattagtgtgcagtcctgcctgattggtgaaatggtctaaagcttggtgcattgcaaaaaaagcacgaaatgcaacactattgccgtcgactaataataattttttttgagaacccatgttgttcctcctacattcgtaaagtgactagctctattctaacaaagaaagtgacgcgcgtcattatgcgcgaccgttgctaatcgcacaaaaaaaagccgcaacaaatggttgcggccttttttaacgtttattttgcttctgggcgatccatgttcattgatgccatgcgaccaaagatttttttgctttggtcgattgttgcgccaacagtatcttggccgatttcattttgtaaatctttgtacaagtctacgtaatagaacaagagatgacgataaacttccaaacccttttccgtcaaatgaacacgacgaatgcgttggtcattttcatcagattgttctgcgataaaagccatcttacgtaatgaacgacattgacgtgaaatcgctgaacgactcacttgcatcttatctgccaatgcactgttagttgtttcattattcgcattttgaatctcgtgcatcactaaaaattggtcgaaagataaaccgtatttttggctttcacgactcattgattcgctaaggttgttaatcaaccaccggtataaacctgcgaattccataaaatctgctgatgtgctaccgagtaaatcggtgttattactcgtatccatttctattcctcctacatgctgaaactttcagtatcaatagttaaccatcgataagtttcatactcacactattcagtacttcaattcttccgtgttctaagatagccgatctaaataatacttagtcagctaatcttaaccgtacttcgatttaaagcaatataaatagtctatagtattaaattatatatttcaactaactttcactaataatcatcaacaacgttcattatgagttgccctgacaacctttattaaatataatttattatttattttaccaaaacaatccacgaagtaaaaaatacagcctcaaaaaaggctgtatttaaaattacttaataattgtgattgtaatatgacgacgaccccaactcttacatgccgcaacagttggaaaatgaacatcaataatgtgacctttaatcgcgctacccatgtcaccagcaattgcatacccgtaaccaggtaccaaaacaagtgagcctaatggaatgacactaggatcaacggcgatacaatttgggtttttagttaaatcaattccagttgcaccaaaatggctcaaaccaggttcggcagttgaataagccgttgcttgcacttgaatcgcttgtccggccttgccatcagcagcgcttgctaaatcggcttgctgggcatttgtgtccacaactggtgcaattggcgcttgtgttgcttcgtcggccgcttttttagctgcttcagccgctttggcttcagcttcttcacgtgcttgttcttctgctttttctttagcaatttttgcaagatccgcttggctttgacttaaattattctttaagccagccacttgttgttccagttcgacagattgttgatccaaactgcttcgttgttcatcaagttctgtcttgctagcttgtaacttatcttgaatggcttgtgtatcacggtaactctgtgctaattcatccatattatggttgtcagcactttgaagaaccgtcaatgtgtaagcccggttgaagaaatcactcaaagaatcagctgacaatagtgcgttgacaacgttgcggtcatcggctgttcgttgaagtgattgcaagcgttccttagcatagcttttacgttttgctaaagtggcttgttgctttttcaaaagcgtttgtgcttgttcgatatttttttcgttatccttaatcttttcctttaaggcattaatttcttgatacttcgcattcacgctcgttaaagtggcttgaatcttcgaatttgtatcatcaatacttttttgggtactgctttcttgggcttgtaattcgctcaaactggcagcactaacagatgtgcccatcgtaaccattgcaactaaacaggtaacaacagctaacgctagttttctaaatcgcatcttgttaaactcctccattcataactcagacttgattatacgcaacaatccccgcaagaagattgcagattaatgacgttatattacagtttgaagacatttataatttttgtgtaataaaaacccacttgtaaccgccgacaaaccaaatacttccaatagaaaaagctaccacaaaagtaaattttgtgatagctttttgactttatacttagattttaattaaaggactaacctttaatccgaactgcgcgggccatttcacgatcttgttcttttcgtttcagtgtttcgcgcttatcgtattcccgtttcccttcaccaacgccgattaaaactttggcaaagccgtgtttcaaataaacccgtaacggcacaatcgtaatccccttattcttcgttaaagcaccaatcttggtaatttccttcttgtgcaacaatagcttccggttgcgcaatgggtcatgattaaactgattgccttgttcataagggctgatatggacattttcgagataggcttctcctttacggacgcgggcgaacccatcacgtaagttgattttgcccttacggaccgatttaatctcggtaccagtgagcactaagcctgcttcgaatgtttccaaaatattataatcgtgaccagcttttttattctgtgcaattaaatttgctggtttttgaggatgtttctttgccattcaatcacctactttttaaaagtacgtttttgtgagtccttgttcgcagctgggcgtcttggatgattgtttttcttttgatcaccacgacgttgaccgcctttttcatgatcacgtgggcgtgctggacgttttggtcgtgcttcaatcttgcttaagatttcagccgaagccaatggcacttcttcaccggctaataattcaaagtccactgagtgggcatctaaatcaacattcgcgaccttgacccgtactggttggccaatgcggaacatcttatgcgttctttcaccgacaagggctaattggctttcaacaaagctatagtagtcatctttcatctgtgagatgtggacgaggccttcaaccgtgcttggtaatgcgataaacatcccaaagctggtaacagaactaatcacagcgtcgtattcattaccgaccttatcaagcatgtattcagccttcttaagatcaacgacttcccgttcagtatcgattgagcgacgttcttcaagggatgtttgttctgcgattggttgtaacttaggtgcccatttttctttttcttcaatcgtcatcccatttgtggcataactatgaatcaaacgatgaaccatcaaatcagggtaacgacggattggagacgtgaaatgcgtgtagaattccgcacccaaaccaaagtgaccaagggattcatcagaataatgtgcttgttgcatacttcttaataacatcgttgtaataatcggttgttcaggttgaccttcaatttgcgtcaagacttcttggagcatcattggcgtcactttcttacttgaaccgtgtgcttgaatcccataagccgtgataaattcaaagaaattcttcatcttatcagcatctggtgtttcatgaatccggtataagaaaggtgcattagcagtactgtaatgttctgcaaccgtttcattagcagccaacataaatgattcaatcatgcgttctgaaagaccgcgttggcgtaattcgatgtcgatggccttgccattttcatcaacgataatcttagcttcgtcttcttcgaaatcaattgcaccacggttatgacgcttcttcaagagaatttcatgtaattctgacatcgtttcaaacattggcacgagccgttcgtattgcgcccgtaagtcagcatcttgatctgttaagatcttattgacgtttttgtatgtcatccgcgctgttgacttaatcacacttgggaaaatcttgtgatccattaccacgccgtgttcattgatttccatttcacacgttaaagcgaggcgttcaacgtctggatttaatgagcaaatcccgtttgataagcggaatggcaacattggaatcacgcgatcagttaaataagtactagtcccacgttctaaggcttcaacgtctaatggtgaaccttcagtgacgtagtaactcacatcagcaatgtggacccctaagtagtagttgccgtttgccaactttttaacgttaactgcatcatcaaaatctttagaatcgtcgccgtcaattgtcacaacgtcttgatccgttaaatctttacgacctagtttatcagattctaaaaccgtatctggaatcgcttctgattgaagccgaacttcttctgggaagtccgtcttaatatcatgttgatacacgattgataaaacgtcaacgccgggatcattcttgttaccaagtacttgtttggcaatccccagcatttgacctggcgcctcaacacttgggtaaccggtaacgtcaacttggaccatgtcacccttttgtggatgtaacccattatccgttaaataaattcggtaattacttaattttttggcatgactttggatgtatccaatccagcctgttttttctttttggatatctgaataaggcataaattcgccgacgatttcttcaatcccccgcgtaatcactttcgccacttttccttcaggaccgcggcggctgttttcttcggcttctttaatgatggccacttcaaccgtgtcaccattcatcgcaaaattcgtattgggtggggcgataaagatatctggatcattaggttccttatcaacgattgaaacgaagccaaagccacgatcgttagcatggaagaccccttcaacaaggcggttgctagctggtaatctgaacttaccggcatcgtccatattcaatgtcttatctccttctaattctgctaatactttcactaggtctttgaacccttgtgaaccggcaacgccgattcgttcactaatttcggatacgtttaattgttgcgttgcatctgcttcaaaaattgcaagaatcgctgctttcatctgttcaacttgtgtcacatcaacacctctttctcatttcttaaaacggtttataaattctaggacatctgtttctaattggtgatgcgcactatcgaccgtaatgacgtggccggcttgtggataccaatgataatcaactgttatgttttgttgcgttaattgctggtgtaagaattgggcttgtgttggatcaataacttgatcttgtccgccttgaccgatgaagaccggtttatctccgatttgcttcaagtcagccacaacttgtcgactgaaaatgccaattgatgcaagttgttgtggtaattgctgattaatagtcgccaaacgtgctgtctgttgcgcagccgggacgcccattaactgcatgattcgattagcatattggccaaagagcggcgtcaatttagcagtcggtccttcgagtactggcgcactaaaaatcccaccaccacaaacttgtggtagttcttctaatgcccgcatggcaaacaatccgcctaatgacaatccgaaaacaaataacagttgtttgttagccgcggataactgctcaatcgcagccaccgtatcggcccaccatgcatcgacagaaccgcgcgttaaaatctcggttggatcagccgttgcatgccctgcaaactgtggtgcactaaccgccagctgatttttctccaaaaagcggcccatcatacggacatcattcgcactacctgtataagcatgtaacaacacaaccccgactgaaccaccgtcaaaataaaacggttgcggcaaccgataagacatgcgctcacccccaaagtccttactgcttgaattcatttaaaaaggtctcctgccattcaacaggagaccgcatcaacgttcttattagaattcgacccgtctcacatgtattagtgtgatgataagtacactaaagctaatgcaaagacgaagaataaagcccctaaaacaacggttactttctgcatgaaagcttcgaaaccacgggccttttgcttgccaaataaatcaccagaaccacctgataacgcactcaaagcatcctgttgtttacttggttgcatcatgactgcgatcacaatcaagattgaatcgattaataataagttcaggataagattttccaacctaattccctacctttctatctacactgtcttttaatactttagcataaaaagtagttaatcaccacttttttatcgattatttcacgagattctcatccgtatttcgcaaggcttgggcagcgtcttcaatttgccgccgcaccgtcgcccgtagctgatgatccgttaacacaatcaacgtgtcaccagcacgaatcaacgtatcaccatgcggaatcagttcggattcgccacgaacaatcgcgattaacaaacatgtctttggccagtccacttcacggacttggcgatcctctaacggtgcgcccgcaaacactggtacctccaagcgatcagagaatgttgctaacttacgatatggtttgccaagtgcgcgttgcaataatgatgcgtaaattggcgcgccccccattaagtcaacgacgatgtaggccaccaacgataaaattgctaatggcatcaagtgcacgagcgaacctaccatctcggtcactagtagaatggccgtaaatggcgccttcccgattccggcaaagtaaccacccatcgcaaaaataattaagttgggaacataaactggtgctaaccaaccaagttgaaccattatgagtccataaagggcaccgattaaagctcctagtgataaaatcggtagaaaaatcccaccaggtaatcctgaaccgtatgaaatcattgaaaaaacaaaccgtaataggaatagaccggccaccacactggttgtcggtaaattttgtccaaggtgtgcaatcaatccattgccaccacccaaaatttcgggccagaaataaccaatcggcaaaacacataataatggcactaatccggtatacgcttttggcagcgggagcttcgcataaagttgtggtaaccacaataataccttctgataaacgtatcccaacagtcctaatacgacaccaagtatcaacaaatgccaatactgattaattggcaaactttgggagtacgtaatatgtaatgtcggtgtcaaaccaaaaaaatttaatgaaatgaagttcgctgcaattgcgctagcaagcgacgtcacccaaactaacggtgaaaagttatggtagatttcttctagtacgaaaaaggtcccggcaattggtgcattaaacgcagccgataagcccgcggcagccccactagcgattaaaatccgacgatcagcaccgcgatttaccaacttagcggcgaccccctgtccaacggcagcccccagctgaatcgatgggccttctcgtcccaagaataagccaggtgcaatacttaaaatgcccccaacaaatttacgccacaggattgaccaccaattgaaatcaaactcaccttccaattgtccttcaacttgtggaatccccgaaccacttatattcggttccttttttaataattgtgccacaagcaggccgatcaataaattggcaccaaccaatggcacccaataccacgggtgtgcatttaacccttgatagatagtgataacaaaggccagtcctttttcaatcgctaagcgaaataaactgaccaccaatccagtgaacgccccaactaataaccctttgcccacaaagcgaaaccgtgtcttattaaactgactagcacgtctaagtcgtccatttcccacgtttgcctaacctccatctgataatgctttatatacagactaccacggaaatggggattatcaaatgttgaaaccaaataaaaaggcgagcactattgctcagcctttattgatggatatcaattttgtatttcaatttaatttcataaaaaagcctttagattagtttatctggtttcgctataacccatcaatcagctaccaacgttttaacttgataggtaccgctattgtgcataacgtttacccgatacgttttacccgaaactgttaaacgcattggtgtaaagacattgccgcttaattctccctcaaaggcctggccaaacactattgtccctatgctgtggtcttcttccatgacaagaatcgtatattttttaaataggtcatttgcaaaagtcaccatcattttggcatctttaagcgttacatccgcaataagcgcattcaagaataactgttgtgcctccttcatttttttcgctagcgcttctttgctgtcttgtggtaactgatttacttgctgccatgctcgatctaacactttttgcgtcacatttggtttcaacttaccgtcctgttcaaataaatccgatactaactttctagcaacaagcacctcttgactaatcactttcactagataagtaccatgcggtaaagtcaccgctatcgagatcgcagtggcatctttttggtttggaataatcaattgatttccttcaacacgaccaacattcggcttaccattcgttacttgagcaatcgtatgtgtatctgcttgaacttttaaatcgtcatattccttaagttttccatcagcaaatgtcaccacaagttctgattctgaattcagttcaatttcaccaactaatacgtctaaatatctttgttggagctttttaaccatctccattaattcttctttatcagtattaggttgtagtgcatcaacctgttggcgtagattgtttaatttatcttgcgttagaatcgtctcgattggttttgttgtgtttaaatagttttccaattgttccctaagcgaagtcccactgatcgattgattaaaccgattataagtcccattggcattttgttgttcaatgataatcatatcggttacatcaagtggttcatcaatctgccaaatatcattaataactgtcccattagctggtttcttatcagccaactccgcgatcaccttgccatttttcttaacaattaatttctgatccttaaagatattaatttgatagtttgttaagtcaactttaatcccttgtttactgagcgacacagccttcattaagctcattggcaattgttttttagtttgattgtcatttaaccaaattgggtcagacaacgttgtgtagttgctgattttcttctgtacttcttcagaaactttaaatccccattgttcataataagggagcatattatagcccgttacttcagagacatgtaacaaaaaatgctgcattcgatcttcatttgaatcataggctaactgattttcgcgataatactgatgtaagatcgggtagaaatcatcgccaaaggtgtttgctagttgggcaaacattgtcattttgacaaagtccccttgttgattgaagtttttatgatcagaatttagataggcgtgcatttctggataatacttatctaaatcaggcatcgcacccgtcatttctttttgcgctgctaacgaataaatattaacactcgattcgacaacttctctccatgtccatggtttttgttgtctctgatgaccacttccatgccagattcccaaggatcctgaagttctaataaacttttcatagctgcatcgcctttaaaacccatgtattcgtttgtcgcatacatataatacgatggcgattctaagaaatgttgtaaatggcgatctgaaaagttaaccggccgaccttcattactgatccctgaaactcgatcttgagcgaccaggaatcggtcataattagccattaacgctttgggatcccccaaatatttcttttccatctcataactcacagtaattaaagcacgatcactaacaagttgaacatcttttgcgtctgtcatttcagtcatttgtttcttaaaatcttcgacactcgtcttgtttgcatcaaagaacggcatttcaccagtggcatcaaagattgacaccctagtaccgcctgaatcatttggattcgtcacataaatagggccatcattttcaactgtaatagtcgtcaccccatttacgagcggatatcgtttctgaacatctcgctcaggcgagccaatcgtcagcgacatcaagtcttgacccgttttgctcaccgtcagcacgtccccttttttggcgtataatccggaaggctctaagcttgaataactcaaggccctttgttgccgagccaattctttattaacatcaccgcggccaatatacagttttgaatatggcgccttttctgaacgtgttacacccttctggtgcctcaccttaggttggaggctatcatcaagcacctcactttgcttactttggtaattagaactggtcgtagcccttgcttcttgtaaaacactcatgcaactggtcgttaaaatgccgaacgctaaaatacctactacttttttgatagtctcatctcctaaaaaattatttttggaacacatttaacttaacacgcttcaccaactccgactataataaaacgataatggtttccataaatattatcgacacacaaaatccatattactgcgataaacaattagaccgataagcatacaacacgtattatacaaataataaaaagcattcttcccgctataccaaaccaatgaaaaagtcgtctaaattcgtattttaattcccattataaatcattatttttttaatattccaagaaataaaacacgtcaaaaaggccaacgcttatacgcaaaaaagtagggaccattttccaaaagtgccttaatttccggtgtttctggcgttttaaattccaagatcataatggtgacaataatcgcgatgacagcatcgctaaatgcttctaatcgacccttattcattctatacatccccttaaccaaaatagctaattttatattttacactatttaattatgatgtgctattatttatagaatgcctgatgtaccagtgcattcaacaactaatccccaacaatcctttcaaagatacttaaaaataaattgatttcagccattaattaatagtataatttatctacgtagtaagggaggaattatcatggaaagagagtatcaatcacgcgcttcacttaaaaaagaagttaagtcattatttgctggtcattggggaaaggccgttacgttgaacatcatccccactctgctatcaattattggggtgattattgtcggagcagtcttgatggtcatgattgccatcttcgcaaacaccgacccatcaatggctgccaatgaatctttttcgggccattcgtctggtagtagttttgctggtcaaattccaagtttcattttggggctcattacacttgggattaattttactttcttagattggctccgttcgaaagatgctgattttagttcactcaaaggagctttcagtgtcttctcaaaacgttatttcttgggcgcttttctaattcgaattttagctagcttatttacattcctttgggcattgttattcattattccggggatcattaaaggctacgcttattctcaagcttcgtatatcttcaaggacttaacagataacgatccacaagctgacgttagctttttagattgtatcactaagagtcgtgagttaatgaatgggcataaattccggtttttcgtcttacaactaagcttcttaggttgggatattttagctggcctctcacttggcattggctatttctggttaacgccatataagaatgcaacttatatggcattctacaaagatcttgcaggcgatcaatttttacagacaacttctgcagatgaaccaactgaagaagttactgttgaagcaatttaaatgaactcaagacgttcttaattgggcgtctttttttgtattatgcggtgattagcagtaggcttagactaaccattttattcagaaaggatgacgtcatcatgaccactaatcaccaaatccaacttgataccgaacataattggcacgcagtgtctagtgaaatccctacgcctaaacctgaagagctactgatcaaagtcagggcaagtagcgtcaaccctgtcgaccttaaaagacgagctagcaccacaaccattttaggctatgacgggtatggtaccgtgcaagcggtcggcgccactgtgaccaactttcaacctggcgatgttgtcttctatgccggcagtacccagatcgatggcagtttccaacactatcaatgtgttccggccgcgatttgtgcgcttgcgcctagtacaatcagtgccgcggagattgccggcttaccgcttgtttcgttaaccgcctatgaattactttttgaaaagcttggttttaccgctgaacaaaatgccaatcgtggcaaacaactattgattatcaatggtgccggtggggttggatcaattctcagtcaactcgccaagtgggccggattcaccgtcactgccacaagcagtctcactcatttcgactggctaaaaacaaacggagttgatcacccgctggattatcattcacctagcagcttagacaacttagccagtcttccggataacacctttgatgccatcgcggtcctttatgatattgaaagctatctccaagaggtcgcacggctgattaaaccgtttggacaagtcggtacgattgttggcaatacgcatccacttgatctcgcaccgcttaagcctaaatcagcctcattttcatttgagtacatgttcactaaaacggactatcaattccaaaccactagtcaaggggcgattctccaacaaattgcgcggctaatcgatgcgcggattctgcatccaatcaccaccgcccactacacaggcttaacggtcgctaatctccaaatgattactgataaactgttaactggccatactactggtaaacagggattggtctactaaacgcaaaaaagccgcaaccaaattggttgcggcttttttaacacaacagtcatcgagttgcggggattgaacccacatcaatcattcattttacgcttcgcttttaatagccaatcgcttttgattttcttgggaggaatttcaatttagatgattggttctaccgttaaactataactcattgggtgttgctaagacacttctttagggaggaattgtctcataaaattaacttgctcagattcacttacttgggagatgcttatctgatatttatagaataccaagcagttgggaccaaattgtgaactttcaagtatgaaatgatgtccgttaaaaaaagcccccaccactttggtgagggctcaattttatagctcatcttccgtcgcgaacaaaccatacttcactttaaagcgactgatgattcggtaccacgactgataaaagaagaaaataaaaaagacatttgataaagcatgggccaagtcaaaatagaaactcgcgacataggctgcaataaaagtcttaatcgtcagtggattgacgtatgcgacaaaataccacatattcataatccacccaaaaataaagccccagacaaacccaaaaatacagagcaagtatttattctgtgcccactgatggcgactaattaagcctgccgtaacgcccatcatgccccagcaaaacatttgccatggggtccatggcccttgtcccaaaaacatattcgagacaatcgcggcggtcgaaccgacaataaaacccgattctggaccaaggactaatgccgacacgataatcacaaaactagttggctgaacactgggcaatggtgcaaatggtacccgagtgactgccgcaatcgccgctaaaaccgcgatgaaaataatttcacgggcgcgaatatcccgggtttcaaaccgccaataaaatggcagcatactggcaatcaaacagataaaactgaagattagaaaatgctgtccttttaaagtgacgataaacaacatgaaaatcgccataatcaagaaagccaatccaaacgtggtccaactattccttaaagctttcatgcgtgcacctcttcccaattcagggcttcgggcaattgactgcgtaacattcggttgatggttgtcgtatagaagaagttatgcgcgaaaaaggcataaggttcttcctccgatacaatcgtcccatcgaataataaggcacactgactagcaagccgggcactaaaggccatatcgtgacttgccataatcaacgttaagccttccgcttgtaaacgcgttaacaattcacccaacgcccgtttgcgaatcggatcaaggccctttgttggctcatccagtaagagtaactgcggctgcgctagcaatacaatcccgagtgcaatcaattgttgctcgccgccactggcatcttgcgggttacgttcagcaagggtttgaagaccgagctttgctagcatctcttctgccacttgttctggtgttgcgcgttttaactgccgcgcccgttcgataaattcttgacggacactatcataactgaaatgatcgctcggtgtttgtgagagataacccactgttttgaaaagttcagcttgcgcccacttaccgatcttcttcccctgtaacttgattgcaccatggcgcggttgtaataaaccaatcaaaagcttcaacaacgtcgatttaccagtcccatttttaccaacaatcgctaaccaatcgccggtatgaacctctagattgagctggtctaaaacataagggtcatttttttcatactgaaaactcacatgtttggcctgcagaattgttgcttggtcgttcgtggctatttcacgtttagtatgtgttaactgccattgtcgccgctcaatcaattgcttgccactgacaacggtcaatggtaatgccgcaatatcagctggtgcaatcaactcattttgtaaaaagacgtgtggcacatctgggacgaattcacgcaatgccggttgcgcccaaattgctgctaatccaccagcaaccggtccttgatacgttatctcaccgccatccatcaaccaaagttgattagagagcggtaaaatatcatccaactggtgttcactgataatcacggtgatgccgagttcgtcatgtacccgttgcaataaactaataaattctttggtcgcaatgggatcgagttgcgctgttggttcatccaacagtaaaagatccggctgtaaaatcaaaaccgacgctaggttgaccagttgtttttgaccacccgataaatcatgcacggaagcatacagcaaatcttggaaacctaaaaagctgactaattcggcaattcgtttttgaatattcgcactcttttcaccaatattctcgagtgaaaaagcgagttcctgaatgaccgtatccatcactaattggttatccggattttgaaagaccatcccaatcttctgcgcacttaacccttgcgataaatcagctaacggttggccctcgaaaataatctcacccgaccgtttaccaacgggccagagttcttttttgagttggcgcaataaggtggtcttcccgctacccgagttcccagctaacgtaatgaagtcacccgtctgaacggttaaattgatgtctttcagattttgttgggttgccaatgcatactgaaaattaaattgttttatttgcgcaatgtccaccataaatattcccatccttctagtaatagcggcaaactatcaattaataagactaacaccaaacatagccaaccaatttgattcaaatgaatcgagccaagtattggataaatcgctaagcggccaatcccctgtttagcaaaataaaaacaaagcgcactgcctgctacaagacttgccaatacccaaccatcccgttgggtaaatcgataacgttgataactcgttcgcttctgtgacccataaccacgggccgtcattgaatcagccgtttgtagtgcgtcaaccaatgaattaatcaataatacttccatcaaacgcatcccggcatgtgatcgggctctaacactccccgtttccatctgcacaccacgtgttctttggacattcttgatattggtaaaccgccgaataaatagtgggacaaaccgcatcgtaatcatcgttaataaagttagttgcggtgaaatccgcacaaataaatataagaacttatgattcgtcatactctgattataggaaacaaacactagcattaagatcgccagcgaaagcgccattaaaaaaccgtacgtgacagcctctgctgtgatcaccgtcccaccaaacgtcgtaatcacgtgcgccccatgattattcataatagggttcatcacgacgataaagagcatcatgaacaatgcaccctgcaatgtccccagtgttttcttctggtttttcgcaagcaagttcactgcaatcatcatcaacaattcacttacaagaaaaatcggatgaataaaaaccattgagaacgcaattgcaatcacgtaatacgcaaagatgacgattggatttaattgatcaaagaccagttgcgattttaaccctgaggcgcgttgcgatcgttcccgagattttccgtatacatccaatcaatcacatctccactcttaacaggataattaccacaagaatagttaggaaaactgccattcactcgataaagccatccgcttaacggtcctttatcaaattcgaatagcccattaatgcctttgatatagacgccgccgcccgtcccacgataggatagtgccatcccgcgactttgcaaatcacgttttaaaacataaatcaccatatccccatccttgatttcaacttgatcaccgttcaaccatttcggattaccttcactaattggtccataaacattgacgctcaccttttcaaggactggttggggcgtcgtagtgggcggtgtaactggtttactttcagttgattgtgacgattgattaatggcggattgggtcgatgccgattggactgccgagccttgttctacagcttgttgcgatgctaattgtttgctagaggccgatttttgtgatgattcatttgtctgttcagattgactgctggacttgcgcgtttcagctgttttccgactttcagataccgccctactatgtgactcagaggccttagatttaaccttaccatctaaaccaacagttgctggcttgacccgtttttttgatctatgttcctctttaacatgttgactacgcgtagacggattatcttgagccacactttgataggtaccgtatccgatgccgcttaaaataactaaactaccgataatcgcaatgattctctttttagacatatctaactcctaacgatgttcaacttgacgcttgaaccaaatgccaataatcccagtcaaaagtatcaagccggctacagaagcaactactgttgagttaacacctgtttgtggtaattgcttttgctttatttgagcatgatcttgattgtctgcttggtgtttattttctttttcaaccgtagtcacttgtcgttcaaacttgaaactgattgtattattcgctgcattaatcgtgatggatttggttggcgtgtcttttaattgataaccctcaactgcaacatcagatgcattaatcaacattgtgcgtccaactctttgatgctgcaattgaattgttttaaacactttgccgttttgatcgactgcttgcaccgtaacgtcagcaaactgcgctgcaggaattgtcccaatcatttgtttccgatactggaacgtcacggtcgttcccgttttagcaacttgaacagtttgttgtgcattgcctaataattcataaccctcaactgcgacttgattagcattcaccgtaatggtttgaccaacgggttgttcagctaattgaagactctttaaaatttgtcccttttcatcaactgcttgggcctttaccgatgctttttcaataactggcgttttaaaatcataaattgagccttttcccgcttggaacaaccggtattgggctaacgtataaacggcttgttcagttgacatcgctagcgatcccatatcgttattaatattccagcggaactgtccatctgctctttgataagcgaccagccgtgaaatcgggttagcgccttgatcgccaacaaatgttgtgactggatcaactccagctgcaattaagcccatgacaaccattgccgtactatttgagttttcttctgtcatataaacactagggattaaaaaaccacccgtttgtgcaacaaatgttttttctttcaacatcgttaccgctttatctagcgcatcttgaacgcctgggaagtcacgatgcatccccaacgccgtcatcgtcatcccggtcgtatctaaatcacttttactaccgaaaaaagcccagccattttcagcgttttgtgcttgtaaaaccgttggaattaaactatcaatcgcttgctgtgccttggcaccataatcacgcatgctaagggcgatgatgccgtaaacttgcccgttgatcccaccagttggtgctttttcaataattttatcaattatatttaaaccagcgaagttggttgcatcttcaccaagtgctgttaccccaattaccaacacttctaaatcggttgccgaaaaacgttgatcagcgagcattgattgtgcatccgcaaccaaggcattatgataactcaagcgttgcgctgcactcagtgtcacgcctgattgaatagctgctaacgctgaccatgcatctggttggccattattcaacaactgttgcgccccagccaccattgctttttgataatccgtactagatgcagtacgtggtgtcacttgtgtaacctttgtctcactcgcagacaccgtttgtgcactaccaataactgaaacaacaggcattattaacattaatcctgtccataataaggtaaaaaattgttgtcgcttcttcatttaactctcctcattccgattaactttgataccctataatttaccatatttaggagctagaaagttggccctataaggttaatcttcacaaatacgccttaaaaaaaacttcatttcaaacacaatttattcatatttcccgcctaaactaatatttattcagttttaaggaggaaatacttatgaattttatcaagcgtgcttggcaaaacgtcatctttaaaaaagggcgtagcttcttattaataattgtgatgaccgtcatcatgatttttatcatggctggtctattgattagaaatgcagccattacaaccgtcaacaataccaaacaacaggtgggcgctagcgtcaccctttctgcaaatcgcgatcaagcgtttaagaaaatgcgcgcctcggctagcagtgatgccccaagtactacagcaacgcgccctaaattaaccatgccctccgtcaaattaaaagacgtaacggctatttcgaaattatccgggctggcaaattataacgtcagcgtcacgacttctgcgaacgcctcgtccattgaagccattacgacatcaagtagttcaaataatagtggtggcatgatgggcggcggctctggcggcaacgctgagtcatccacttcaacaggtgacttacaaatcaccggagtgctcaataccgcaaccctcagcgactttaaagataatacaagtaaaatcacgaaaggtcgcgctttaaatagtagcgacaaaaacactaataatgtcgtcatcgaatccgaattggctaaagaaaacagcctcaaagtcggcgacaccattaaagtcaaagccagcacgacaggcaaaaaagcctatacgctaaaagtagtcgggatctataaggctagtcaaagtagcgctggcatgggtccacaacaaacagaccccgcaaacgtcatctatacggcatacacattagctaaccaaattaaaggtcaaactggcaaagtggatagtgccacattcacgcttagtgacccaactaagaaaaatagttttgtaaaagcagcgaagaagattatcaatacgaagaaattcacggtaacagctgatgacagtacttaccaatcactcaaacaatccatgcagaaaatggctagttttgctaataagattgtttggttagtcgctatcgctggcactgttatcctcgcattaattattatcttaatggttcgcgaacggcgttatgaaatgggcgttttactctcattaggtgaaaagcgcgtcaaaatcgtgggccaattattagttgaaatgttcatgctgctgattgtcagtttagctttagccggcattggcggacgattcgctggtcaagcgcttagcaaacaagttatgcgttccgtcacaaccgaaacgacaaccagctcacaaacaaataacatgcaacctggcggtaacggcggccctggtggcggtcaagcccctagtggccaaactggtggcaatcggccaagtggtcaaatgcaacaacctggccaatctgctaaaaaagccgtcaaagcaagcgaccttgatctgaagattagtgccgtcaccttaatgcaacttggcgcattcggcttcaccatcatcgcatttgccgtcttactcgcatcactcaatattttacgactcgagccacgcaaaattctcattggataattataggaggtccactatgttaacagctaaaaacatcagttactggtacgatactgaagaaaatacactttacaaagatgttaatctcgattttgaagccggcaaactctacggcatcatcggtagcagtggtgctggaaaaacgaccttactcaccatgctttcagggttagataaaccgcgccgcgggagtattttatacgaaggtaccgatatccaaaaaatcggcttaacccaataccgcaatcgctatgtgtccatcgtgtttcaagcctacaacttactcccctacatgtcggcactcgacaacgtcttgactgcgatggccattactcattcgacgcatgacaatgctgccgatttcgcactcgaaatgctcagcaaggttggcatcaatcccgaactcgcccataagaacgtacaaaaactatcaggtggccagcaacaacgcgttgcgatcgtgcgcgccatgtgttgttcagcccccatcgttgttgccgacgaaccaaccggtaacttagatgaacaaaatacgcaggagatcattcatctcttccaagaattagcccatcaacaacaaaaatgtgtgattcttgtcacccatgaaaaagaagtcgcagcaagttgtgatgttcagtatcatcttcaaaataaaacctttcaaccagttgcttaactaagtaaaaaacgactgagcctgtttacggcttggtcgttttttaacgggcatgctatactgagggcaatcaaaaggagggcttctaaatgctaacaatcttctatggttcttttagccatgctggccattcatttattattgcagcaacccccaaaggtatctgttttgttggttcacccgatggcactatcagtgaattaaccacttttcttccccaaacgaaattagttgcaaatcaagccgcaatcgctccttatagtgaatcattaacagcttatctcgatggtgaccaagccacgtggtcactgccaattgatattatcggcggcacaccttttcaaagaagtgtttggaccgccctgcaagctgtgccatatgatcaaaccacaacttacagcgctttggcggctcaagtcgggcaccccaccgcaattcgcgcagtggcttctgccattggtcgcaatccactattgatgattattccttgccatcgcgtctaccgtaaagacgggcaaattggggggtatcgtggcggacttgaattgaaacaaaccctccaccagcttgaaactcaaaccaaataaggggattaatttgaaattttgtcaataaaagtctatacttattattaagtcggtggtagaatgtacggttactctactcctttcaaattaagaaaaagagatgattattacgcaagtaactgatgtttatgggttaacccacgaaaactgcaagctgatcgaaactgaaaatgattttactcgcatcttcctagctgaaggtcctgatggtacacgttatacgtgtttactacctgatgcgaaacccaatccaaagtcaaaccaacactttgaatatggtaatccagcagatgcaccatactagatactaaaaaagcgccaacggatattagaatccgttgacgcttttttgttgaaacgtgttctcgccagcatatttctgcacttaaccaaatttaccaaatcagcgattacatcgccaatttggtaaatccagtcaatgctcagcactctattctgccattaatatatccaagaattgttcgccgtatttttctagtttattttcgccgacccctttgacatctagcatttcagtcaaggaagttggcatgatttcacacattgaatatagggtcttatccgagaaaatcacaaacggaggcacaccttgttcttccgctaaatcgcggcgtaactcacgtagttgttcaaataattcattatcttcaggcaacgttttttgcactttgaccgccatcttgcgcgtcactttcgcttggccttttaagactgcaactcccgccgccgtgatttgcagcactgggtattgaccgccagaagcttgcaaatatcctgaagcgactaagtaatcgatcaaaccactgatttctttttgcgaatcaccacgcattagaccatacgttgggagttcatcaaagcggaattgcatgattttttgattcttcgagcccgtcaatacttgcgccaccaacactttgccaaaccgttcatccatccgtttaacgcacgataagactttttgtacatcaatcgtgatgtcttgttcttcacgcgtatccagacagttactgcaccggccgcacgcttcacaatcatcatcaaaataattgacgatgtactgttgcaaacattgctgcgtattggcgtactgcgtcatttcttgcaacttggcatattcttgttgcttatgcgcttcgtccatttccgactgatcgataaagaaatgctgaatctgcacatcattcactttaaataatagaatcgcttcactcggcaagccatcacgcccggcccggccagcttcttgatagtaagcctctaaactcccaggaatctgggcatgcacgacaaagcgcacattacttttatcaatgcccatgccaaacgcattagtcgcgaccattatcggtttgcgatcatagagaaaatcctcttgattctgacgacgcaccgcttcgtttaatccgccatgatacattgtcacatctaacttagccttttcaatcagcttcgtgagccgttcaacttctttccgtgtgctggcgtaaataatcccggatttttgtttgttgacctttaaataatcgattaagtagcgatcactattttgatttttaactacttgaaacgcaagattctgccgtgaaaaccccgtcttaacttcgtgctgaatgttcaaccgttgcatgatgtcagctgccacttgtgaggttgccgtagcggttaaagccacaatcgttggtcgttggcgcatactctgaatcgtatccgtcaggcgtagataacttggccgaaaatcgtggccccattgcgaaatacaatgcgcttcatcgaccgcaatcaaatcaatcgttaattcagctaaatcagctaaaaagtaatccgaatccaagcgttccggcgaaacatatagtaatttcacttcaccacgcgcagcttggttaaagcgttcttggacttccccctgcgttagcgtactattgataaacgtggctggaatcccattttcattaagcgcatcgacttgatccttcatcaaagaaatcaacggtgataccaccaacgttaaaccgggtagcatcaatgctggtatttgataacacaatgacttcccgccaccagttggcataatcgccaagacattagtgcctgccaacaatgattcgatcacatctgcttgaccttctctaaagtgatcataaccaaatttttcttttagtaccgcttgtgcttgcatgccatttctcccacccgttaaaattcctaccttctatcataacaaagattcgttaattccggttaattgaatctcagtttcaagcattccttcaatcaattcttactggctgacaaaaccagcgatttagtgtttaattagaagcatcaaagactgtcaggaggcttcctatgaccttggaaattaatgcaacattaacggctacccaaacgatcgtcgatttaatcgaacaacccgttactcagcttttaattgaacaaacaccggctaatacaaccgcattcgcacaccccgctttattcctcggttttgcgcagcaacaactgcaacaaattgaacaactctccccacttgaaacagcctcgactgatcaagttgacacgggtatctggattaccatggatcctgagtggactgaacaaattggctacgtagggcagctattagccgagcaaaatcaaccaccgataacgagcgcctcgcttccgtccaacgtctctcaaaatttccgaacaaccttagctccagccgttgaagccatcatcttggtcctcagccgctttggttatcccctgaccaaaagcgcaccagtcaaagcaaaaccggctaaaacacgtcatcgatggacaaaagccatcagccaaatcgaattcactgttgccacgcgcgaagcacaaggaacagccatctggcaaaagcgcaacgagatgttattgaaagcaggggcacaattgcggccaaccgcgccacttaataaggatggctcgtttggctttgctgctaaaatgggcactcacttgcgcaacgaacatgcagcgcaaattcaagacaatcaaacgactgaagacattattttcaagagcgtgaatgaaatcggcctcttcttgtactttggtggcaccaatagttggctcgaactatgcgacacaaatggtcgctcaattgacgactggactaaaatctaaaatagaaaagagattcaacatgcaaattatcagttctggcattcatcacggctacttcgacgacctctacggcggtcatggcactcaatttaacgcggaaggtgtgccaacttattccattccgtttaacattcaagacgcacctagcgatacagtcagttatgctgccgttttctacgatctagatgcctacgaagtgacgcaagggtttccttggattcactggacacttgccaatttaaaaacgaccactgtcgcggctaatgctagccaacaagcgcccgatttcatccaaggtgttaatacttggcacagtcccaaaacagaccatttatcaacagaagcaagtgcttgctacggcgggatgacaccccctaaccgcgatcacacttatacacttaaagtatttgcacttgataccacgctcgatttacagcctggcttttacctaaatcaaatgacagcggcaatgcgcggtcacatcttagatagcgctattttagaagcacaataccgccaatttaaacattaggtgacaatggccttaactcggctaacacttttgtcatctgatcttaaaatcgtcgcttttttacgcttaacatcgtatgataactttatcaattcggaataaggagttctcattcaatgaaaaaaaacaattagcattattgcgataatcgccctcatcatcgtcggatttgctggctaccgttaatacaaaaatacgtatgtcggcgaagtaggctacgccaaagttgctgctcaatctccagctaaagaagccaccaaagatgattcaggtaaaacagtgactaatatgtatagctatcactaccaactaaatgtggtgaaagaagatggtagccaccaagtggtccctgtcgaagttactggcgaaaatccaacgccactcactcccaacagctatgtcaaagttgaatttaattcaaaacgcgtcttaaaagggcctaatactgtgtccaagaatcaaattccggctaaagttctggcgggtttagataaataataaattagcttatcctagtaccattaatacttgttattagctgttaccctcttaaattaagttattaaaaagcagtacccttgattagttatcatgggtgctgctttttgtatgtttcctgtgaaacattttgttttgtttgattttctttaaggcttcacgttgggcgaagattgttagttcgtgttcttcaacaaacgtcatcacccactcaggattttccttactatagttacgtaaagcccagccaattgctttttggataaagaactcatctgtgtcaatatctgccagaatggcttcttccaaaaacgccacattcgttttttcgtaaaaactgagttgtagcgtaatcgcaatccggcgcagccagaaattctcagcacctataaaatgctgtgcaacccaatcaaactgttcaggatgcagtctgatgtactctccaaatacttttcgccaagcatcgatgctgtcccaccaaactttttccaacaccaacgttaataaatgttccatatcagccggttcccaccaacgtactgaacgcaatgccatctcgatggcaacatattgatactcacgcgttggttgagcatataaagtctcaatgaactgcattatttctgctggtgacaattgtttcacagactgccacaattcgcgttcaattaaatggcggtccggtgctttaacaccgttaaattcaaattgactctgcatgtatttcttcattgccgcctgattttctggatatatcggtaattcaaaatccatggttatccctccactatatcgcctctaaaaaacttgtgccgtttgtttagctgtttcaatagcttcctgcataatcacgttagctttttctggcgaataatcaattccttcgatactaattttaatgacttcgtcaacaccggcaaagccaagaattgttttaacgtattgtgttgcaaaatcttggccagcataaacgcttccggctgactgaatatgaactgcttttttcccagttactaagggctgcggagctgtttcagtatgtctaaatgtttttccagccaccatcactgtgtcaatccacgctttaagtttcgtcggtacatttaaattccaaagcggattagcaatcacaaacttatcggttgctaagaactggtcggtatagcgattaaaccgagcgaccttctcttgctgactagcgcttaaggtggccatagcttgcccttttttaacgccgcccatgccgtcattagttcttgatcaatttctggtaagtcagattggtacaagtccaaccaactgatttcatcagctggattttgtttttgataaacttgcatgaactgcgccaaaatcgttaacgtccgtgactattctgtagcaagtggatgcgccttaacaactaatactttactcattaatttccgccccttagtatttaaactttatacactatcgttttagtatactatctgcggcgttgtccataagctttacatcatttaataaaccaaccacctattaatgaccttttacaacgttttatacagcaacaaacaaccaaaaacgattaataagtcataaatataccgcaccatcgttcgactatcaattcgagtgctcacccaattgcccaacggaatcacaactaacaataatggtaagctaagtcccaatagttgcaatacttggatggtccaaaagcccgctaaaatatgactgattacaacgattgtcccaacacaaataaaatgggcctgtagaatgccccttaacgatgctactggccatttttttaatgtcccataaatcaccactggcacaccatgactattgtaggcactgcccatcacgcctgatattatcccagctaaataatcccaatgatgtgactgtaaatgttgctgctgcacgtgatgtcggtgtaactgatagcgattatagctgtcataaaggattaaaaacccagctaacgttctcaacacaatcgtcgttggcacatacgtcatcagcgctatcccgactggcacacccaataatgaaccaatcactagtcgcctgacaaccgctatatcaatctgttggcggtggcgaatcactgccggaatcgccacaattagtcccagcgcgccaatcaaagccgttgccgcttttttaaatcaatcgctactagggccaataatggcatcgttactaatgcctcaccaaacccaaaaaccgttctggtaaaagcgcccaacgcaacgatcaaaagaatcataattatcgtcatccaaaaatccttcctaaaccgttttgttccacacaaccttttcaaactgcgtgccattactttttagtacggataaacttgcattagcaaccattttttgtgatcgaatttcctcaaacggaatccctagtagtgtgttgataacaaacaataaaataatcccatgcgcaacaactaatacatcaccatcaggatacgtcgtttgagcagtcttaatcgcgagcatcccacgttctaagaccgcctggtaggactccgcgtgaatctgtttggcatcaaacagctctggatgatggaagtaattttcatattgtggatggttcgtcaaactagcaccaggttggccttcccaatcaccaagtgccatttcttttaaatcatccacgaccatgattgccggttgtgattgattagtctgcgacactatcgcatccattgtttcaacggcacgtgttaatggtgacgtcagtaacgcatcaaaagactggtccgctaataaactacctagtcgtttagcagccgcttgccccgcctcagttaatgttgaattcgtcccaccaccattgaaacactgtactcgattaaccatcgtttcaccatgccgtacaaaataaaaagttgtcatgttgatcccgcctttataggatctatcatactataaaatgcaaaaaaagacgcagttcaaattgaactgcgccttcattgagcctcgttttatttaccttccgacgtgttttctgccacgacttggtcataggcctttgtaccagcatagacttcgtcagttaggatgttgcgtttatacttcatgacacgataaatgtggagaattaagactgccacattaatgaccagtgctaaaccactgattgtcatcaaagcagcactactgtgcgtaccttgcactgaaaattgtgaatccgttacaaaagcgggataactcattgtaaacatcatccaaaaagccaatgtttgcgcacgtgcttggagccagctcccttttttaaccaggaatgctgctaatgtacatgaaattaataatgcagcgcccgcatagaatgagtgatcaccaacacaattgtaaacataggcgaagttccaaacatcataggcgataatccaaggccagatttgatcgggccagatcatgtctttttgtttgtcatgactgataataatgccgaaccagcctgagattgtgatgatgttaataattccggcaatcccgttcatgatattccacgcgccaccattcatgatcacaccgtcgactaagccatgtaggtgtgaaacttgaaaatcacgaatcacagcttccataatattaaacgctaaaattgcgggtgggaaaatcaatgcccacttgttgtgttgtaacttagggataaagcgcagcgccataaaccctaaacaacctgctaatgctgagtacactttaacccagtggaaccaagtcccggtactgctaccaggaccagccgtcgttggccaaacaaagagcgttaaaacgactggtaacccaacaaagagaattaatccaatccacttgttagcccgagctgcttcatttaaaaccattaatgcaataaccactagtccccaaactagccaatccattcctgaaatattttgaaataaaaacatatcagtcacctccaaagaaataattgctaattacattcttactttaactgcaagctggcggtttctgtatggtcaattcaggataaatgtccaaatctaatgattattttgtaaaacatggttcacagtaccatttaacatgcgatgcatgcgctgataaaattcctctttagattcttgtagatttgttacaagccattgcgtaatctgtgtcgccaatgcccaaccataaaattggcaatttcatctcggaaagtcgctggacaatccacctttaaatcttgaacaacccctgcaaccatgttaaaagcaactcgatacaaaaaacgacttagtaaatctcgattaagtgaatgaaacgtatttaaacagaaatgccgattgttttcaatataagttaccaagacacctagaccgacgacccaatcccgttcacgttgatacactgccagttgcgtaacaatttcacgattataaatccaagcaaccaactcattaatatcggcgaaatggtaataaaacgtattgcgcgcaacgtcagcactgctcgtcaattgattgaccgtaatgtgatcgaccggagttgttttcatcaattcttttaaggtatctgctagcttttgcttggtatccatcgtattgccctccaaaaattatctatgattagcatcccatagatagttccgaactgcaatcactaacccgatttgcactccaggataaattgttctatcgttagagagtacaattaacggaggcgacttataatatgcacgaaactgacgacgcttttagggcgatgaccaatggggaatggtactttgattcagcggtcactattcaaaaacgggatgcagcccgccttgccttacaaaaggccagccaaatcttagataacgatgcacggatggccactatccaaaaattactcggtcataccggtagcgattttttcatcgaaaccggttttgaatttagcttcggtgaaaacattacgattggcgatcatttttacgccaatcgtaacgtcgttatttgtgacgaagcaccagtcaccattggtgactactgtaaatttggcccaggagtatcactcttaaccccttaccacccaattgaccccttagaacgtgcgacaaaaaaagaaatttctagtcccattactatcggcaatcacgtctggctcggtgcaaatgtcacaattctgccaggaatcacgctcggcaataacgttgtcgttggtgccggcagtgtcgtgaccaaatcctatccgggtaacgtaattttagttggtaatccagcacgggtattacggaaaattcccgctaaataatcaaaaaggactgacaaatgtcagtccttttttaggcttcaattgcataatattcaataatcgtttgtaaagcctccgctgcgcgttgatctccaattaacttagtgtagtatgctgtaaatcgttcatctgctacatacatggctgctaaaccgcggtgcattgctagactataccggggagtcgctgtttgtaaccacgtttgatgggcttcaaaggctgtttgcgccgcttctgatggcaattgcggctggtccaagtaagtttgtaatgccgtcttcaatcggtcttcagccgcctgcatcgttgcatattgggcctcacttagccctaaaaagtgctgatcggcttcttgcttggcttgtttcccatagttagtcgtcacttcttgcccgtagcgttgctcattttcagccactgcctgttgtttaaactgtttgaatttagtttgatctgtcatttgaattcctccggtttgattttgaagggtcgcatctagctgtgctaacgttgccgttagcgcagcttgttgtttaaccagttgttcccgctgatttgctaagcgttccagacgctcggccggtggtaacgccaacagctgctgaatctcagccagactaaactgtagttgacggtacattaagattaactgcagtcgatctgcatcctggctcgaatacgttcgataaccattactagcaaccgttggcaccagtaaaccgcgctcgtgataataacgtagcgtacgctcagaaaccccggtcaattcagcgaaagttttaatctgataatccatttgccttccctccttcaaaacccactataaggcctgacgtgacgtgaaggtcaagcattgttcgttagtgcctgattaatttctgtttaaccaagtaatcatgggccacatcgcgtgctttgcggtgtttgacctgtacttggtagttcatctcttgcatttggctctcagtaatctgacctgccaagcgattcaatgctttgacgacttccggatgcgccttggcaaagccggctttcataatcggtgccccttgataaggcgggaagaagtgacgatcatcttctaaaacaactagtttgtaccgtgcgacttccgcatcggttgtataaccatcgaccacatcgaccttgccgtccgcaatcgctttatagcgaatacttggctccataattttagcatttaaatttaattgataggtgtcctttaacccttgatacccatctttttggtgataaaaatcaggatcaaaaccggccgtaaatggttgattcaaagcggctaaatccgaaattgttttgacattatatttcttggcaaaggccgcagtaaccgccaagtcataaccgttttgatagcgcattggcggtaagtacgccatattgaactgttcttgtagcgatgtttttgcaagttgatacgttttagttggattctggtttgtcttagttggcgacttcaccaacgtctgtaaaaccgttcctgtgaattcaggataaatatcaatcttatcagccttcaaggcgttaaataagaatgtggtcccaccgaaattaggtttaaccgttactttgtagttaggctggtcttctaaaattagatcacgatacatattcatcaagatttcgggttcactacccaatttcccagcaatcgtgatggtggtctgcggcgcttgaaaccgtgtcattccttcgatcacaccgaaaaggccaacaaaaatggctaaactgactgtgatttttttaaaggataatgtccctaaccagcgaattaatgcactgaccactaacgctaaaaccgctgaaagtgtcgccccaaccaataatagtgcgttattatttgactgaatcccaacaagaataaacgtcccgaggccgcccgcaccaatcaaggccgccaaggtagctgtcccgataatcatcacgagtgcaatccgcaaacccgagataatcaacggcatcgcaagtggcagttcaatccgtagtagccgtttagcgcgcggcaacccgaaggctatttctgcctcttttaatgctggatcaattccgatcaaaccagtgtatgtattttgaaaaatcggcattaaggcataaagtactaacgtaatcacagccggaatcgtcccaattccgacaagcgggatcaataatcctaagagcgccaaagacggaattgtctgtaagacactcgtgacttgcagcattgcttcagctaatttctgatgagctgttaaaacaatcgccaacggaatcccgatagccgccgcaattaataacgccaataacgaaatctccaaatgttgcccaagtgcttgtagcaactcaccggattgggtcgttaaaatttgttcaatctgttgcatcatcgttatagcccccgtttcgcaatgagcgttgttaaatcggtcatcgtcaattgccgttgttcttgaccatcagtggcaactacgcccccatctggatggtctactaattgttgcgctaattcagctaatgttgcactggacgtaatcgttgtcggctgattattaacaacagttcctaaatcggccgccaataaatcttgaactgtcaacgatgcttgttggcgttcaatgtcaaaaaattcgcgaacaaattcattttttggttgattaaaaatcgcttttgctgtcccgacttgctgaatactgccttggcgcattaccgcaatttcatcacccaagcgcaacgcttctttcatatcgtgggtcacaaatacaattgtattatgcagctgcttttgtaaactcaaaacgagatcttgtaattgtgtacgggtcaccggatcaagcgcactaaagggttcatccatcaaaatcaccttagaactagttgctaacgcacgaataatcccaatccgctgctgctgtccccctgataattcgcttggataacggctagcatactgatccggatctaaatggaccatttccaaaagttcgcgtgcccgtttttgacgatcagctttggtccatttcaatacctctaattgaatggtaatattttcctcaattgtaagatgtggaaacaacgcaatgttttgtagaacgtaaccaatattgagccgtaacgtttggagatccatttgattgatgggttggccgtcaatcttaattgtgccactcgtgggttcaattaaccgattaatcattttaaccgttgttgtctttccgctaccactcggtccgaccaaaacaaatagaccattgtctggaatggttaacgtcaagccatctaatgctaagctttgttcatattgcttagtgacaccttcaaattcaatcatgtgctactcctttttccggttaacgatttgttaacttattgtaccacttagcaatcagcccaccaattgacgtgcttaaacacccaatccaatttttttgattcgctttgtgactatgctaagatgaacccgaattgaaatctgaggaggtcttaatatgcaaacacactttgatacaatcattattggtggcggtcctggcggcttagcggcggcttacagtctcgctgaacaacagtccgtcttagtcgttgaaaatgatttatggggcggcacttgccccaaccgtggctgtgatcctaaaaaaatgctttattcagctgtcgaagcactcgacaatcaacaagcgctccaaacaaatggcttagtcggaactagcgctattaactggtctgaactgatggcctttaagcgatcttatacgcaacaaatcccaactggtaccctcaacggtctacaacatgccggcatccaaaccgtcacgggcaccgcccacttcagtgatactcaaaccttgcagattaatggtgacacttacactgccgaccatttcatcattgcgaccggtcaaacaccaacgctccctacaatcgagggtcacgatttactacaaaccagtaatgaatttttagacctcgatcgtttaccagaaaaggttgcctttattggtggcgggtatatcgccattgaactggcaaatattgcagttactgctggtgcagaagtccatattattcaacataacgagcgtattttacgcgacttccctgaagttttaacacataaactcgtcaccagtcttcaggaaaaaggcattcactttcattttgacactgacgtcacaacaattacgcaaaccagcaatcagctaactctcagtaatcaagctaattttaaactgacagtcgacgccgcttttgccgcaatgggccgcaaacccaatatcgaccaactggcattggaaaaagctggggtaacagcgaaccagcatggcattcaagtcaatgaccatttaatgagtagtaatccccgcgtcttcgccattggtgacgtcgtagatcgtgtccaacccaaattaacaccagttgctggttttgaaggccgctatgtcgccaaccaactactcgctaaaaagacagcacccattacttacccactcattccacatacggtatatgcaagcccacaaatatcacaagtaggcgtttctgttgcaactgcacaagctgctcctagtcaataccgcattaatcaacaaaccgtcacaaattggtataccttcaatcgtattcaagaatccgacgcaatggtcatcaccatttttgacaatcaaactaaccaactcgtcggtgctgcggcttacaccacaattgctgaagaactcattaattactttaccaacctgattaaacatcagacaaccgcaacggaactcaccgataccatctataactacccaagcccggcgagtgatttaaaatattattattaaaaaaagtgttgagggccaacttactcacgaccttcaacactttttttaattttcttttttcgccttcatctgtaaccagatattaaacgcgagcacaatcaccaataggactgtcgcaatcagcatgatgttatgcaagccttggtacataatcgcgcgcatcgctggtaataagtgcgctggtaattcgtgaacgcgttggagattgcttaacttattcatcatcgccatcgtaatttgaccgtgcgattcggcaatgccgcgtgttaaggcatggtttaaaatcacaccgtaaatcgatgacatgaatgtttgactgagaattcgcaagagataggcaaacgacgtcgcaatgggaacatcacgttcttcggcatcttcttgaacactgatttgtaggacgttaaaactcatcccgagcccgaaaccttcaaaggcccccatcaacagtaagaaccaaaacgatgcttggtcgcccatcatcaacataccgctaaacgcaattaaaaacgcaactgttcccaatgtcacaacgcggtgtttacccaatttaggctgaattgcgggacccgccaatgagccaattaagttggtcaccgcacctggaatctgcgtcattccaccgagtagcgcacttaatccaagtagcccttgtgcccacattggaatatagatattaaacgcgataaatgcgccccataaaacaacaaataaaataaagtcggtcaccaattgcggatttttaaataagcggttcggtacaatcggatcaactgcccggtcttcaactctaaacaagacaactaataaagctaaaccagcaaataccaatcctaaaacgagtgctagcgaacccgtcccaatcatttgaatccccgtcaataaagtcaccaaactggtaatcataatcccagcacctaaataatcgacgtttccggtttgatgtgatttaagcgtttctttaaagaaataacgaacacaaacaattgatactagggcaattggtacattgatataaaagacccaatgccaactaaacgtatcgacaatccagccaccaattaggggacctacaattgaagccgcactataactcgcagtcgcataaccaatcacctgcgcgcgtttgcgtaaatttttgtataagtcggcatagataatgaatggtaaagtattcatcccgccagcaccgatgcccatcaccgttcgtgcaatcagaaagaagacgatattccccgaaaccgcctgaaaaatcgaaccaaccgcaaataataatgtcgccagctggtaagccccacgatttccaatccgttcgcctaatttactccataagggggtcgcaaccgccatccccaaaaggaaaaccgccacaatccagcccatatattgaatcccgtgtaaatcactgataatagcaggcaaagccgtgttgataattgtcccatcgagtcccgccattgtgttggataataataatgctaatgttaccaaaagtgtatttttcttactcacgattgcgtgctccatgtatttttcttttatatttattatagtataagttatttcgtttaacgagcttacttcagtataccaatcacttttaatatcataccttatcatatacattttcacacaaataaaaaagacgccctcctcaggacgtcctctaactttaatttaatgcgtcaaactgttcgactttttggcgagctttatcactccgccgcatccggataccatattccgttaaaccaatcacaacagcgactatcaagagaatcaataaactcttccaatcttgcttcaaaataagcaaatcgcccgcaaaggcgtagataaacgcgacaatcgttgaacccccaaagcacgccaggccctgtgctcggggggtgaggtgggtgtctccagccgccaagttgacaaaggccgtaggaatcatcggcactgcatagccaattaatacaccaagcgctggatgttgcatcttaattaatgcgcggtaaacacgcgaatccggctttttactgcgatgatttctgacacgggcaaataattggacttgcaacaagttcccgatcgtcaagccaatcgcattgaccacgaaaccaccccaatgacccaaacacgcgccaataatcaatgccaccgctgatgttggcgcacccggaattaaggtgaccccaatcattaacagaccaaacaccaagaaagcatacggccccagatgacgaatctcaagcacatattggcggtaattttgccattgatccaagaaagcaaaaacggcggtctggtgttgccatccaattagaagaatcactaatcctagtaaaatcacaccgcttgctagccaaagtcgtttccgttgtctcttcgtcatcagattcccctcatttctacttaacaaatagtcctagttcctctagtataaacaacctgcaaaggggacaacaagtttattttctattttgattcaattcgttcactaagcgcttattttgatagcgcgtgtagtaataaaaaataatcacgtgcattacgaatgttaataacgacgtccctaataaatacggtgaaacaacatcaaataacgttgtcgaatagagcctcaaagcgagtatttgaaacccaatattactaatagtactaatcaaaacattccacggcgcaccgaacgtcgaatagcgccataagtatgaataaatgacgccaaacacaacgccaatcaacacgcctaggctaactaatcgccaagcagccagcgcttcgccccgtgttagcgttgtgacaacagtgagccacataatcgccattaatgccacttgattaaagtctttgcggatttgcttcatcattttaaccactcctttatttgcttggcataataccgactaacaatatactgtcttccagattacgtatagaccaccaatcgcgcatttgaacccaccgcaaaattggcaacttgctgcagatttaaaatcgttgtgttattaattctcagaaaaccgttctgtgaaaacggggctaattgttttaaattactagggtagtaatagctattgccatcgattgtcgccaccttcgccaaatgtccaaaggccgtaaaactttcaattgccgttaatgatctgttttgtaatcgatctgttcgcgcatctcgcacctgaatcgattgatcaaaggttagcttcttaaaagcagattcaaccgttgcttgattctgtggttgactgtgaacgacaatcgtatcttgtgcacactttgaatcccaattaaatataattttcattaactcgcctcctctacaaacctaaagatagcagaagatctcgcttaattcgatgactatttgttttgttgcaagctgctctctcttgttgcatataaaaaagcctcattcaacaatgaggccttttatgcctatctctatttgtgatacggacttccttgattaatcataaacgcccggtaaatctgttctgtcaatactaagcgcatcaattggtggggtagtgtgagcttgccaaatgaaagtgcatcattggcgcgtttgttaaccgcatcgctagtcccgagtgacccgccgatgacaaatgtgatatctgatttaccataggtcgccaaatcttgaatttcctttgcgaattcttctgaggcacgttgtttgccttgaatcgccaggacaatcacatgttccttatctttaatcttgttgagaattcgttcgccttctttgtctttgacgttagtcatttcagcgtcacttaatgattcgggcgctttttcatccgcgacttcaatcatttcgaacttacagaacttactgagccgtttcgcatattccacgatccccgcttttaaatacttttcctttaatttaccaactgtgattactttaatgttcataaatagcctcctactgttacttacattttaggggaaaacaatgcagaaaaaaagctattcacagtaattcaccggaaagtactgcttatccacaaaagttgtccacatatgcacaagtgttcgtcccaaatatggtatctcgaatttttcttgatactaaataaccgacacctaaattttttcgttaaatttaataaaaaagttatccacccttttttgattgttcgttctcaaattatccggttacaaatccttttatatcagcgttattctggtgttataataattttaaaaaagttatccaccgcctgttaatttttttgtggataactaaaaagaccttttaaccgtgttatacccacaatccacagacttatccacagacgctcggatttcttcccaggttactatccacattgacatttttaaaacttaacattcctgccactttagtctgaatttaaccaaaataaaaaagccgtcaacatctaattgatgctggcggctttaatttattttgctgccgttgtactatctgttgatgctgcttcagtcaacttcactgttgatttcttcaattcaccattatgataatactgaatttcaaccgtactattcatatcgtaactgtaaagtgtcgtgtgtaaatcagcaacacttgtgacatccttgccacctaaaccaacaatgacgtcgtatttactaatccctgccttcttagcaactgagttggcattgactgatgcaacaactaccccactcttcacagaggttggtaatttcaagactgatgattgttgcgttgatgaaacattcgtcaaatcgatgacgctaatcccaagcgctggtcgaacaactttcccatttgcaaccaattggttaataattttgaccacttcgttacttggaatggcaaagcccatcccttcaaccgttgtgctcccgttagaagctaacttcattgaattgatcccgatgacttgtcctgcaaggttaactagcggaccacctgaattcccagggttaatcgctgtatcagtttgaataacggttgcttggccagtcgcttgaccggttgtttcatccgtcacatcaatcgtccgtttctttgctgaaataatcccttgggtaacagaagtagcatattctgagcctaaaggcgaaccaatcgcgagcactgattcaccaggtttaatgctgtcagaatcaccaaacgttgcggtcttcgtcactttggcactatcaatctttaaaacggctaaatcagaaacggcatccgttccgactaagctagcatcaatttttgtgccatcactaaggatgacttccaacttatctgagccagaaacaacgtgattgttcgtgacaatgtaggctttaccatctttcttttcgtagattaaacctgagccttcactcgattcttcaagctcactactactactttttttattggtactatccgcgccaaagagcgcactcaaatcgcctgaattatcttgttgtttttgcaagttaacaactgacacaaccgctttgttgaccttattaaaggcagttgttgtttgtgaagatgagttgactttgatattactaattttagtggcacctgctttagttggtacttgggcagtgcttgagacagtgttacttcccatctttgaaccggcataaccagcaacgccaccaccgattagtgctgcgataacggcaacaacagccgttttcattaatcctgaattctgattcatactaattcacccaaactttctaataaattctgtttattgattatctctatcatagaatgtaaatttgaaaaaattatgaacaagttacgaatattaaattgtttttctaatccgcattttagcgaacttatttcgcaaaaacaactaaaatgtcttctattcagtctaattacacggcaaacaatggatcagcaactgccggatcagtatctagaatttcaaagtctattcccaccccataatcatgttcctttaagatcgacgcaaccgtcaaatgggccagttccttcatgttattttcttgactcaagtggcctaggaaaacgcgtttagtctggttccccataaacgacatcaaagcggatgccccatcttcattcgataaatggccggtatcactgagaatccgttgtttcaatgaccaaggatactttcccatccgaagcatctctaaatcgtggttgcattccactaaataagcatccgcattttcaattgtcccacgcacttgatcagagacataacccgtatcggtcaggattgcaaaggcacggttattatgatggaattggtagaattgggcagcagccgcatcatgtgacaccccataactttcaatatctaaatcaccaactgacaaggtactacccatttcaaaaatgtgcttgtgttcagcaggcacttcaccaataatcgaagccatcgcatcccatgttggttgatttgcgtacacgtctattccgtatcgccgggccaaaacaccgacaccactactatgatcgcgatgctcatgggtcactaataaactgtccacatctttaagatcgcggccaatactatgcattaaatcttgcacacgtttcccactcattcctgcatcgactaacactttatgattaggtgtttcaatatacgttgtgttgccagaactactgcttgcgagcacgctgacttgcattgcgtctttttctaccatgttttgctctatccccttggtctctttctaaaacaactaaatttcactacggttcttcatcagcgcaccggtaaaggcgttaatccgcttaacgacgacactcttagaattcttattctcaatggccacttgccaagctggcacgtacaccgtactactattggcgtccaacaaagcactgtatccgagtttcacccacataatgcgtgagttattcggaatctcattatctgtatataaatcaatgaccgcgtcttgagcagtcaccttcgtactttctttttcacgcaaaacttgaatcttattcgtgtaagtttgcgtgtaatgactaatctgcccgtcttctaatgtaaaaatcaactgaccatgttcatccatgatctgcccgcctgggactttttgcacatatacgacttgttgatcactcgataatgcgtgtgaatagcggtagtcctccgcttgaaccacgttgtctggttccttcataaaggccgccacggctaagcgttggttcccttttttgtaagtcagtggtttatccaattcactcgtcagtgtcatgcgcgctttatcaaacgaaacagtttgaccggttagtttggcactcgccgtttctaataatgtctgatctttttgtcggctggctaaataataaccatccattcggcgcttggagagtttcttcactgaaatttgatcgtcttttaaatccttcataatctggctagtctgtgaaccactagtaatcgccgtcgacgttattgtctgactgcctttcagcgaggcaaataaatagatatccagcgcaataaaaatggcgataaaaatcatttcaattctgcgaaaatccattcatctaactcccttcggttaattcagctttttgcgccatcaatgcggataagctacgccaaacccctttatactgtacaaagtaggttggatttaaatcaatcacttgttcgttactggtttctttggtccattcataaccgacttgcacgttttccacattttctagcaagaaaccattacttgtcaattgattcaaaacagactcggtacttggcaatgtgacttgcttgtcttcagcaggaacgggtacttgcaaactataatttgaaaaatcaatcttttggccagttggtaagaattgtactttcacgctcccaaagttagtctgataaaagactgggaatccttcaacgtaggtccgataagcagtcgaattcgttgctttatcataactatagaaacgcatccctgaaagggcgttacctgtctttaaaagcgcatcaaaactggcttcaaaactctttgttaatgtgcttggtgatttctcattttcatacttcacaaacgaaatttcaccggtatcatggttgatcgttaggcgtttatacaaattgctgtccgtcccatccgtataaatcgcactattgccttgttctttcgtatcaatattatccgtattttgttgattcaacagcgttgtgatgtaataattttcgggttgttgattaactaaataactataaggcaacaacgtttgatccgctgccacatagagtaatggcttgtgattcaacattttttcggtcactttcaaatgcacatcggcatttttaagcacctttttcacacgagcttgtgaaaaaacattgagtgtcgtttggtacacttgatgactttgatcattcatcaaccacaacttaggctgtgtgcccaacgtgattcgaatccgattgaatgtcacgttttgacctaaattattattctgataactgaagacctttttaaaaatagcgtacgaaatattatcaggatataaaagggtcaatgtatgatcctcactaattgcctggtaataatcgtcttcgcttagcttaacttgcttaaactgtgccgacttggcaagctttaaagtcgctttaaactgtggaatcaaactctcttttgagttataaatcaactgactctgattgtctgtccgccacaatagttgcgtcggcaagaagatatcaccgatttttcgttctgtcttacgacttgttgacttagtggtggtttgactgtccgtttggcgctcataatgcgcgttactggtccagattagccatgatagcccgatactgacgataatggcagcaatcagtataacgcgcattaaaaagttattaaatcgcatcccaatcacctccatcagaatcaattggttcatatggcaacgaaatgtagaatgtcgagcctttaccttcttggctatcaacccaaacacgcccacgatgcgcttcgatcacttctttagaaattgccaagcctaaaccagtcccgccttgtttacgagaacgggccttatcaacccggtagaagcgatcaaagatcttaccaaggtctttccgtggaatccctaatccttgatcagagatgcttaaaatcacgtgacgatgtgtttccaataagcgacacgtaatcacgccaccatctggtgaatatttaatcgcattattcatgatattatcgatcacctgcataaatttatcggtatcaatttcaacccataaatcccgcttagtgaagtctcgtgtaatactgtacttcttattcggatcatctgttggcaatttgcccgtgctggttgtcagtttaggcaaatcatctttatgctcttgatcccgcttgatcatcatatcaaaccgatccagtgcatacccaaagaactcgtttaaattaacatattcgagattcatctttgccgttccttgatccattcgtgacaaactcaatagatcgttgatcattcgaatcatccgatcagtttcttcttgggtcacctttaagaaattgggcgctagctctggatcttgccatgcgccatcattcagcgcttcaatatagctccgcacgcttgttaatggcgtccgcaattcgtgagacacattcgaaacgaattcgcgctgttcttgttcattcttttgttgttcggtgacatcgtggagcacacaaactaaaccggtgatatagccggtttctttttgaattaatgaaaaatcaacatgcaagattaagtcgtgatcttgttgttctgagaaatccaagaccatttcctgttgcgtttctaatagatcgcgcaaagaatattcatcactgattcgtaaaactttaagcaatgactggcccagtaactcatcgcgtgtcacatttaaaaaatcttggccagtttcattgataatcgtgatattgcctcgtcgatcagtcgcaatgaccccatcagtcatatgactgagcacactatcaagtcgccgtcgttccgactctgacgcttcttgcgcctcttcaacccgaactgataagttattgaccgcaatcgcgagttgccccagttcatcttgaccataaatcttaacttgcccagagtaatccccacgcgccatttgaatcgcttgtttcttcatttcatcaattggtcgggtaattgcccgggaaataacaatcgataatgccatccctaataaaccagcgactaaagacgaggttaagaaaatgacggtaatcgacgaaatccccttataaacatcttccatactagcccgaatataaacggcgcccacaacggtattactatccccacttgggttcgtcaatggttggatcactgtataatagctccctagactctcattgtatgccacttcttgttcggtatgcccagagtaaataacctgtttcacccgtgggttacgcgtcttttgaccaacggtactttgattattcaagttcgtgacacctcgaatggtgcccttattatcgacaacttgaatttcggcagaattgcccatatcgccaataatctctttaatattcttgttcgcattaccactattactcagtaactcattactaagttggttttgaatatagggtgtcacttgtaaggattgcttaaaatcacgcacattctgatattccagttgcttcacaaaagaagcgccgataacttccaacgttaccagcagcaacaatacgaacacaatggcaattttaaaatgaatcgattgtagcaaccgaattttcttattcatgcggcaaatttactcctgctcaggatttcttaagtagtaaccaacaccccggcgtgtcactaaccattctgggtggctggggttgtcttcaattttttcacgtaaacggcggaccgtcacatcgactgtccggacatcaccgaagtaatcatacccccaaaccgtttgtaataaatgttcacgggtcatcacttggccgatatgtttggctagataatgtaataattcaaattcacgatgcgttaattcaatcttgtcgccccgttttgacacaatataagcatcaggatggatcgttaaatccccgatgttaatctcgtgattttcttcattcgcttctttatctgattgactcgttgtaccttgccggcgtaagttagccttaactcgcgccactaattctcgatttgagaatggtttcgtcacataatcatcggcaccgagttcgaggccaatcactttatcgatttcagaatctttagccgtcaccataataattggcatatcatgcgatttacgtacttggcgggccacttctagcccatcaatcttcggtaacatcagatctaatagaattaaatctgggacagcctcttcaacttgttgtaaggcttcttcaccatcataagccgtgtagacttcgtaaccctctttggttagattaaatttaacaatgtcagagatcggtttttcatcatcaacgactagtatttttttagccatgtgcggatcctccttgaatgtggatgctttgccttctattatactcattttcagaaggcaattcaaaattaggtcaattcctaccaactggattaacgacattgttaatccctataacgattaattcttacgcgctcagtaactttattcaaaaaaaatacaaataactgtttacaaaagtttgtttaatatgctatgatatttaagtcgtaaggcgagacatcatatgggtggttagctcagctggcagagcaacggactcttaatccgtgggtccagggttcgatcccctgaccacccatcaagtatacatgataagtcgttatagaggtgcttaggcattgatatgacggcttttttatttcttcttagcagattagtattcacagtgaatacgacaaaccgtattcaaaaccgtattcacgtattcaacaaaaatcacgcacggggcatatacataacttactgcaggcggtcatattaatggccgtcttttaatttgggctaacttcattagccaacgatttaagttaaacatagactgttaaaaacatactagcaaccattagcattcatttttattaaatttgtggtttccgtcgtaaatcgcgactgtattcattagataagggggtgcctccagttttggacagacgtttcaaacgggcccaagtttagcttggttgtatttttcgacctagataatatctaggggtaacgtttcgttactccatatgtttctatatcaaaacacatctgctcaagcttgagccaatttatatctaattgagtagcacggaattttccgctgtactcattttattttgacctaatagaacgatctgttatggcaggttatttcatggttcgacaaaccgccctattttagggcctcctttttctaaactaccgtttcggtacctcagattgcttccatgcaattagccgaaaccaaagatggattgggcaacatctcgttaaaatcaacggtatctaaagttaattagggccgaattttcggccgtactgtttctataattggctaagtatctgacgcaccatatcagtgcattagatgctgttgtaatatactaactcatctttaaggagtcatcaattcggtgactccttctttagggcctctaaaatctctaaataaattaatgttaggttttgttaggttttatgtccaacaaaaaccaacattattcattctctttagggtgtctgatttgtacggatagaaataaaaaaagggcattttgtctacttttgtctagttatatttaacaccaaaggctaccaccacgggtttaaagctaattcacgtaggtttacattggataaaccaataatggcttgtcctattcaattactaatccataaactagcctgcgaagttttgcgcaacctacttataaacaagcaactcctgattattatagctttcggcaaaagctaataacgccctattcttaaaccgattataactagacctgctataccccatcgtgtccgctatatattgccttgttttatgactaccgtctaagtaacacatattaataatggatgcttgcgtgtcttccattcctcctacaatcgcttggatacactttaaatcacgcttagcctgctcgtgtaagggatgactagtatttactgtggctagccgtctaatcgtgtcatagctctttaacagctttctggcgttgttgatacttgcttgttggtttattcggtcaatgatcatactgcttcgctccttaagtattaattcaattttgatggcatcctaaatcaggactgcatccccgttatcaatgcttcttgaatattaataagccttcactagggtaggactcggcaaactctagcaaagcctgcttcttatgcttcttgaatgatgatgctgttatacctagttcaccgcagatataagccatggttaatttaccagcacttaaatactgcatctttagcaattccctgttaattaccgttagcttacttaaagccacgtctatgtattctagggtctgccgtgcctcgagtgttttaaccgcccgtttctcggttgtattatcactgctaaaagactttggcgcatgatcacaaataggactctttaaatgactggcactacctgcaatatgtttcactcaccaatatcgctttaataatctatctgcttgctgtctgctcttatcctcatcaatatcaaaaagaaacactctgacacctccaacatattaaaaagggatgcactattgccatgtactagcagtaacgcatccctttggttttccaatcaggtattaaactaatttagtcttgtctgttcgttcaatgaacaccaccttattattttgagttgtaacagttaagctcccataacttggtaactgatattctttgctttgctgttgatccgtaataataattttgaccatcatatcacctctaaatatcaatcccaaattcttcagttagttgatgatgtttagcgaattccttgccacggtcgggcgtaatcgtacccaagtgttctggtggcagatcttttagtagtcttcgaatagtagtggtcacactggctgagtttttcttagctgctttgtgcattattaagtatcttgaacaacggtcaaccattgtgaccacacaagatctgccagttttgccagctacagtatccagctcccagtggccaatctgagtccgcttattggcagactcaggtcgttcttggagtgtatgcgatataggaatcttcccgcgacgttcctcataaccttttttatggcgcgatttaccatgatgtctaagctttctgatcacccctctggcacctcgtgatgaaagcttctgatcaaataaaccggagtagatgccacgataaatcgtggtgtagctgatctgaaatgatgaggtctctaattttaagcgtgcggcaatttcttctggtgaccattgtagatccaagaataaatgccggattaattgaagcaattggtgatcagaaagtagcgaccggcgtccacaatgagatttttgagcttcgtagcgctcttgagcaacagaaggtgaatatgccgatctatttcgcgataactcacggctaactgtcgacgttgctcgaccaattgtttgggcaattgaagtcagtgaagcctgattattatgcatcaggaatatcgtttcgcgttcactcatggtaagatgtttgtatgggctcatgattatgtgctcccttcgatggttgtcttcgcaaacaccattttacagggattcatatcatgagtctcttttgttgcacttaaagtataaattcaaggcaataaaaaacgttcaccgcaagtgaacgtttttttgacttacctatttagtttgtgaaacggtgttgcgggcgctaacacgtttgaagacgtggacggcaacccctaaaacggcaccgactaaggcagggactaaccaagctaagccgtagttggcgaatggcaagtatgcctgttcgaagccagtcatcgctttaccgaagctactttggctgacgaccgctggaaaagcagttaccatgtcgaaaaaagcaggaacaacggtaaagagaacaacgaatttatacacgactgggtctttgtggaacagtggtgaagcgactgacaataaaatcaagaccattgatagtgggtataagaacatcaacattggcgttgaccaagcgatgatttgatttaaaccgatattagcggtcaagaatgatgccagagtagttagaactaaccaagtgcggtagctaactttgggaaaatgtttatgaaagtcttgggcaaaagccgcaactaaaccgatcgccgtggttaagcaagtgacggtgatcaaagtggctaagatggcctgaccagcgacgcccatataatgattgacaatttggtcaaaagcgatgccgccattagcggaaactttgaatttacctaaggacatcgcgccaacgaagatcaaaccaacgtagatgacggcgatcattgccattgcgaagacgccggcacgggcagtgaccagcgcaacactgttagcgcgttttttgcctaaggtgcgaacggcggtaactacggtgaccccgaaggctaagccagctagggcgtccatcgtgttataaccttgcaagaaaccattgacgaaagagcctgatgtataagcagcggtggcgtgttgaacaccggcgtggcccattggtgaactaaaagctaagaagaaaacgccagctaataagactaagaaaactggatttaataacttaccgatattgttgacgattttattttcctctaatgagaaaaagagggctaagccgaagaaaacagcggagaaaactaataaaccaactgtttggaaattctttggtactagtggcgctaagccaaccgtgtaggaaacggtggctgtccgtggtgtaccaaaaagtgggccgatggtgccgtggatcaagatcatgaataagagcgcgaatacgggacctaaaggccgcccaacatcatagacaccttcggaacgagtgatactgattgctaaaacggataataatggtaataacacaccagtgactaagaagccaagcgcggcaggcacccaattctgtcccgctaactggcctaaatgtaatggaaaaatcaagttaccagcaccaaagaatagaccaaaaagcattgaactaaccacgaaataatcgcgtttagtgagtttacgttcctctaacataagcagcactccttaaattttgtaggtttgtggaaatgtggttcaaagactaagcgtctgttgccccacgtttaaatcatgagtgttgccattgctaagtcgactttagtaatggcggcgatcatcctgcgcgggaatgatcacgataaacaaaaaacgtccaaacctgaaaaattaatttcagataaggacgttaataaacgtgttaccaccttgatttgccattttctcacgaaaacagcctcttcgggtacaagcaccgattggtacgaaataccctagctcgataatgggagcccccaatgaacgctcaaacttcgcatccatcgctcaaagatgattttctaattgtcgcaccttgacgtccttgcaccaaacgacgctcgcttaactggtgaatacaattatacttttcttatcacagcgtttaattttctcattgatttatcatgtggctataatttaacgcgattttaagtgtttgtcaagggggtgataaaaataaatttataatttaaggcagtagtccatattgaattaacgtgtcaatgctatctaatacgatggtcgtattatcaaaatgtggctgccattttaggatatcttgcgctttttaggtactcaactgacgattgacgtgcactaataaattgccttcgcgggcggtctggttgaacaaagcagcgctgcttaaaagcaagttcggcatcgttttagtgggaatgttttgggcaatttgcggtcgtttttggcgaatcagtgctgctatctctggtagtgatatctgaccagcagcactagccagaaaacgttgcccgccagcgtgaggtgcggtcagcgcacgaatgtataagtcagcaacatcgcgcacatcgatcagattgagtgggatattgggaatcattttgggacgaccgttaagtaaatttttcaaaagatcgaagctgccagaaacgtgggcgtctaatgctgggcccataatcgccaccggattgatcgtagtcagttctaaactgccgtgactttgttcaataaactgccagacagcctgttcggcgatcagtttgaatttttcataggccgataagcctttttcgttaggatcagtccaatcggcttcagtggtgatgctcgtttggtcgtgattactgaagccgatggcgccaaagttggcggtcatgacaacacgcttgacgtgggcctgttgggcggcctttaaaatgcgtaaaataccctcggtggcagttgtgtcgctgttcgggtcattggaaaaaacgggtgatgctacacttagcacgtagtcgatgttctgcatggctgtcgcccagccagcatcttgagtgagatcagcggcgaaaaaacttaaattttcgcggtgttgcgcctgattttcttttagggcggtgcggacggtggtttgtttgtcgagttggcgtaaggtggcacggacgtgataaccttgatttaaaagttgtaagataatgtgcagacccagataaccgttgccgccggtaactaatacgttttttgtcatgatattatgctcctattccctaatatggatcctaatgaacacttggaacaatacacgttatttcgagtattagcctttactggtgttaggtgtggcgagtgcttagccctaacttgggatgacttagacacacaaaaaggcaccttgagtattaacaaaacgttaactcaaggtgctggcggtaaacagattatccaagcgactaagaccaagaaaggtaaccgactaatctcacttgataaacaaaccctattctatttacgtaaatggcagatggaccaaaagcggatatatttcatgctgggctttaacacatcccaacctagccagctaatctttgcaacaactaagaatacctttaaatcactaaacacgccctctaaatggcttagacggctaacagatggtactagcctaccaaagataacagttcacggctttaggcacactcacgcatcggctttattctctgctggcacatccatcaaagaggttcaagaaagactaggtcacgaggacgcccaaacgactctcaatatttatactcatgttactaatagccaaaataaagaggccgtccaaaagctggttaatttcttagatttctaacaaaccgtattcaaagacgtattcacatcataaaaactatgtaataaaacccctataactactggtatactggcattttaacgtggaacaggctcaaacccctgaccacccatcaagtatacatgataagtgataataaaaacgcaattgcgtttttattatcactttttttatttttaacttaaaaaaccatccatcaatgatgtatgatttctagactactctttaagttctcccccgtagccaacatccttatattgtttcatcaactttaatatctgcttactattcttttgatcatgactatacggctgcgtctgtgtccgatgatcgtacagctttaccttgccgccttttcgatcagctaagtagatatccttttccatcagattaatctcatgataggcatcctctgggatctcaaatgcgactgttttattaccaaaaggactccgcgtcttctccccataaatctggatattttgcttcccattagagagattataagttccttctttactctctaaaggtccgaagatgccacctgacgaactggcagaggtcggcttcaattcaccatatacatttaaaacaaggtgcccggccttcttttcaaaaaaagtattgttaatctttaaatctgataattgcatttcagttggtcggttcaaccatgcattaacgcccaaaaaaactaaaacgaagatgccaatcgcaccaacatatttcaaactggttttgagtacccgataaattttatttttcattaacacactctccttcaatttcgaatcattgcctagtagataatcaatgcttacgccaaacaaactactgatagccattaatttatcgatatctggataactcacttcattttcccatttggaaacagtctgccttgaaataaataattgatcggccaagtcttgttgtgacagatgttgcgctaatcgattcctctttaattctgctgcaaaactcactttgccacctcctcaataattgcatcatagcttacaattaacaaaataacgcgcaccaaataagtgccccacgtttaaaactagctatttcctgctttgcaagcaccacttgcttttcattctgacaatctaccgttatgctagagctaatcatttagggaggtttaaccattatgcttgctaccattttaaaagaacgccgactggcactgaacttaacccaacaagccgttgctgaccaattgcacaccacgcggcaaacaatttccaattgggaaaccggtaagaactatccggatgtccccatgttaattgccatcagtgaactttattctctaacaattgacgacatgctcaaggctgacgatgattatgtccaacaagtctctgatgactatcaactgattaaacaaatcaaacaatcccacgttgttgattggggattaggactctcattagggacattacttgtgattttaatcgtccacgcctttttccctgcagtcttaaccgaatcaatgtctgggctattaactttaagcgttgcggttgttttgattggcttcagttacttcaaaacacgccaattttatccaattataccgcatgctaaacagcccttaattatccctaagccaattggggtcggcttaacgattaaccagaatcacccactcggaaaagtcatttgggtattgattattctattcttagtaggtggcctcattccaatgattttcaaataaaaaacgtcatccaatagatgacgtttttatgtttatgcgtatagagccttttgattatatttaacatattgtttaccaaagctaacaaccattcctgatatcttcttagcgactggataaagcacaagcccaataatgaataatgccagacatgaaatcaattggaataccataaagcacactaagtgtttttaaaacatgaacgtttggtaatgttttatcttgctcccatctagaaaccatttgacgtgtaacaaacaatttctgtgcaacttgttcctgcgtcaccccaacattcatcctagcttcctttaaagcattcccaactgacattttgccacctccgctataaacctaatttaacgaattaacccccacaaaaacaagcaacaaatctgttgcatccctgatattaaagcatttcaactcactggcagtcttttatttcccgggttaattcccgaaaacagctaacattttctttgttgccttttgggtcttcacgagttcaccttgaatacaccatctgcggaccgttttatcacaggtaatcaatgtcaccattttacgacctggtacatcatcgatgacttttacgtcgtatggactgattgaagctttgtaatcaactttgtacgtgtagactttttccatatccgttaagtagaccttatcgctgacgcgcacattttcaagtggcagaaagatgttttggaaagaatgccctgctaaagcataattgttaactgcacccatttgctgatcaggtttcattgtgcctccaccttgagccattgtgtcctctgagacgcctttcatgactggcaaggccatcttgacacttggaattgcaacttttcctaagacaatcacatcgcctttaatagcggcattcacaatctgttttgtatcgagtgaatcaaccttatcaaaatcaaagctcgcttttttatgttggtttttcttaatttgagcagctgtgacgtccatctgacgatgcgccatcattttaaccagttggttgcggattggattgatgaagaccaacactaatccaaccactaacagaatggctaataagccattaattaatcggtttcttgtctttttttgcataacagtttaaacccttcactagtatttacgactattgtaacacactattttatatttaccggctctaaatccttgtgattcgcaattaataacagcaacacataaaaacgcacaaccgaaactttcggctgtgcgtttgttgtttattttacgtttaagatgtacataaagaccacgaaaacaaagaataaaacatacataattggatgaatttctttgcgacgaccagctgtaatcattgtgattggatagacgataaagcccaatgcaatcccgtcagaaatactgtaagtcagtggcatgcctagaacgattaagaaggcaggaattgcaatttctaatttttcccagtcaattttcttcaatgattgagccattaaaacaccgacaatcactaatgcgggggccgtcacttgtgacgtgacaaccgtcaataatggtgagaagaataaactgaagacgaataacacacccgtcacaacggccgttaaaccagttcgaccaccaacagcaatcccagcggacgattcgacaaaggccccaactggtgatgttccgagtaatgacccagctaacatggccgttgaatctgataccaaagctttcccaacgcgaggcatcttgttatctttcatgaagccggcttgttcagctaaaccgaccaatgtcccggcggtatcaaagaaggtcactaataagaaagtgagtacaacgacccacatttgaacggtgttgatatcgccaatgtgatttaaaccagctaagaaagtgggtttcaaacttggcgcagctgcaacaaagtgtgttggcaacttaattaggccactgatggctcccacaattgaggttagaagcatcccgataaagattgctcctggtactttacggaccattaaaataacggtaatgattaagccgaaaacagttaaccaagtcgtcccttgcgagaagtcccccaaaccaacaacggttgatttgttcgcaacaatcaagccaccaccgtgtaaaccgatgaaagccacaaacatcccaatcccagctgaaatcgctagtttcatattccgcggaatggcatcaataatgatttcccgtagcttaaagacagtaatcaacatgaagattaatgaagccacaaatacacccgctaaggccgtctgccatgacacacccatcccgataaccactgaataactgaaaaaggcattaatccctaaagctggtgcggttgcaattgggtatttagcatataaccccatcaagaaacacccgatcgcacttgctaatgctgtggctgcaaaaacagcccctttatccatccctgaatcacctaaaacgctcgggttaacgaataaaatataaaccattgaaataaatgtggtgaatcctgctaggatttcccgttgcactgttgaatgttgttcttcaatcccgaagaaacgacttactctttccataacgactcctctaaaccaactaattttcccactatctttttagtggtaatgtgtgtataatactgactggtgccaaacccatgagaatgaaagtttgttggcgtgtttaacgacacgtttagaaaacgaactttgcattctctttttttgtactctttttcagcaatacctaccagatagcagataagacatttgtttgttcacgatctggaccaacagcaaatgttgctaatggtaaatcaactaattcttgaattcgttcaacatagtgccgcgcattagctggcaagtcttctagcgtcttagcacccgtgatatcttcatcccaaccaggtaattcttcataaatcggtgtgcaacgttctaattcgcggagacttgctggataacgatcgatttgttcgccatctaattcgtaagcgacacagatcttcaatgttttaatcccagttaggacatccacacagtttaatgataattgggtcacacccgccactcgttttgaatgccgaagcacaactgagtcgaaccagccaacgcgtcttgggcgaccagtaacagtaccatattcatgaccggcttcacgaatgaagtcgccagtttcatcatctaactgagttgggaatgggccatcaccaacgcgtgaggtataagccttagccaccccaaccacttcgtcaatccgtgaagcaccaactcctgaacctgttgaaacgccgccggcagggtttgatgatgtcacaaatggatacgtaccttggtcgatatccaagaggatgccttgtgcgccttcaaataagacattccccttttgatccaaaacatcattcaaaacaactgaagtatcacaaacatattgtttaatttcttgaccatattgataatattctgcaaacattgtctcatattcaagtggttcagcaccgtagattttagtaaagagcgcatttttttcgtctaagttttgttttaatttagttgcaaagagttccttgtccaataaatcggcaatccgaatcccactccgagcggctttatccatataagctgggccaatcccacgattagtcgtcccaatcttttgatcacccttggctgcttcttgtaagccatccaatttagaatggtatggcaagataacgtgtgcccgatctgatactcttaattgactcacgttgatcccttgatccgttaaatatttcaattcagaaacgagggtcttcggatttacaacgaccccgttgccaatcacgctgagtttgtcactgttaaaaatcccagatggaattaattgtaaatggtaagttgtgtcacccaactgaatggtatgacctgcattgtcgccaccttgataacgcgcgatagcatcagcattttgacctaaaaagtcggtaatcttgcctttaccttcatcgccccactgtgttccaacaactactacagatgtcatataaacatactcctctattcgaatccgtcttcagatccgctatttaaaccctaaaactcacaaaaactattgtagcaacaaattatctcaaaatcaatataaaagacgaactttaaaatctctaatcagcctttattcagtaaaatcttaacgatacatataaccgataaaatacgaacgtaaataacgaacaatgatccctattttgacaggcgttcattaaaaaaatacaatataaccacatctaacaccaaaggagctcatcatgggttacgtcagcaatatcattactgcggcaattgcctttccattcgtcgcaatcatcttaaccgttccactgttagtttaccactatcatcgttatggttcgctaaccatcctgcgtagtgtaattctctacagcttcatgttctacttggtagccgcttactgcttaattattcttcccctccccccacgctcggtggtcgctcatttaaccaccccgcgctataacttagttccctttacgtttgtccgggagtttatcaactcaacccatttcgtttggaccgaaccgagttcatacctcgcaacacttaaacaagcggcaaccattcagccgttgtttaacatctttttaaccgttccatttggcatttatttacgttacttctttaaaacgtctttcaaacagcccttattacttagttttacgttatccctattctttgaactcacgcaactttccggactgtatggtatttatcctcgcccttatcggttatttgatgttgatgacttattgctcaacatctctggcgggctgcttggattttatctccagcccttggtcacctttttcttacccactcgtgaaagtttggatcaagcagcctatgcgcgcggtcaaaaagtgggctacttccggcgcttattggcacttgccgttgattactgtgtgttaggcatcattacatttgcaattgctgttatctggcgattactaaaactacccaccattcattcagaaatgcttcagtactgcctgacaactggtgcttacttcttaatgctccccgttttttggcgtggcaaaacacctggtcaatctctcctgcaactacagattgtcgctgaccatcatcctcgttgggcgatcttctggcgccagctactcctatttttcatcgtcattcccagttttcaactctggcgcgtcaccctggatgccgctgttgctagtggccaacaacattttgacgtctatctctttattatcggtctctcactcttaccaccactgttattcaccggtaacttcttattaagttgggtgactaaacgaccacaattattctacgagaaactaacccatacacgggtcattagtagcattcaccccactcagcaaccttaaaaaagccttaaaatcatctctaattcctaaaaatagttaaaatcggatactttacggcttgaattggctatactaaaggtatcattcgctttgagaaaggattattgcttatgtttaataaattgaagttcctcatccccattgcatttactgctattatcggtctgagcgcacaaccggcctttgccgacagcaccacatcgtgggacaaacccgttgccactcttgggaccagcctttctagcacccaaaaagctgataccctcaagacactggaaaatgccgcgaatgtcacagatgtcagtgaactaacagtgaccggttccacacttgtaaaatatcttgatcaaaatcaacaaacatttaacgccaactcaagtgtctactcaagtgctttaattcaaaaaaatgacagcaataccggcatcaatgttaaaattatcgattttaatggccgtaacaacatcaccacaattacagccaaccaatataaaaatgcggccttaaccgccggcgtcacgaatgcgacaatttacgtgacttccgccattccaatcgatggctctggcgccttagctggtgtttacgccgctttcgctgaaaatggcgattcactcaaccaagcgcaagtaactgctgctcaagacgaaatgagcaccctcagcgatatcacacaggctaataaaggcaccgatggttattcagattcccaattgaataatgccgtcacaggtgccaaaaaagacatggcaagtaagggcaataatctgactgttaaccaaattactaccatcgtcaataatcaactcgaacaaaacaacctcaccaacatcatcaacaataatcaaaaacaacaaatcattaatgttctcgttaaaatccaagattccggtgctttaaattcggatgatttcaagaatcaagccggtaagttaatgaataatatccaaagtggtgcgaaaaacatcttcaataagctcaacacccaaagcaatcggaacttcattcaaaaactctttgatagcatggctaatttcttcaaaggattatttaactaaataacacaaaaaagccccgcaaactgaagtttgcggggctttttatttattcattatttcgttgttgcttttaaggcaactgcatctgcagcaactgtggtactcattgcgttaaacttaatgtaatcaacagcgggcatgttggtaatgatcaccatcattgccgtcttcttaccagcagcagtaatttgattcaaatcaaccgttgctaataagtcgccatgtttgattgtttggccttcttcaacagcgactgcaaaaggtgcgccgtttaattcaaccgtatcaattcccatgtgcactaagacttctaaaccgttcgttgttttaatcccgattgcatgtttcgttgggaacacagtcataacagtcccatcaactggtgcaacaattttgccgtctgttggaatgacagcgtagccatcaccgagcattttttgagcaaaagttggatcatcaacattttcaatatcgatcaattcaccattagcaactgcatagaaaacatctgtttcacctgagttaatatcgctatcaacaggtgcttcaactggtgcggcagcttgttctggtgtacttgttgcgattggcgtattgtggttataaagttcttttaaagcatcagcaacaaattggacttctgtcccaataataatttgaatgtttgttttatctaaaacgttaatcccagcagtaccaacagctttaatcgctgattggttaacattggcagtgtcttctaattgtaatcgaagacgtgttgtacagttgtcaatcactttgatattgtctttgccaccgattgcagcgtagatccgttttgcttgaaccatgaatttatcatcagtagcgtctgtttcaacgccagcagtatcttcatcaacagcatcttctgcttcacgacctggtgtcatcaagttaaacttcttgatggcaaagttgaacccaaagtagtaaataactgccatgaccaacccttcaaccaataacatcaacggttggttagcaactgggtttttcaaacttaaaacataatcgactaatccagcactaaatgcgaaaccggctgtccagtggaagaaagcagcaacagccaatgaaatccctgtgaaagctgcatgcaatacataaagtggccatgcaacaaacatgaatgagaattcaagtggttctgtcacccctgtaaagaatgacgcaaaaccagcagctaacatcaatgaagctgttgctttacggcgttctggacgagcatttttgtagattgcgtaagccccagcaggtaagccgaacatcatgactgggaagaaaccagcttgatacatccctgtcttaccaatcacagctgaaccattcgcaagtgatttcgcaccacccaagaaattcccgatatcattaatgttagcaacatcaaaccagaacacagagttcaaggcatggtgtaatccggttggaattaataaacggttgaaaaagccgtatagaccggcaccaaaccaacccaatttagaaattgcttcaccaaatgacactaatactgtaaagacggctggccaaacaaagtacaagatagctgaaacaaccatcattgcagttgccgccataattggcactaaacgtttcccactaaagaatgagagggccattggcaacttcacgttgtggaagcgattatacattgcagccgcaattaagccggcaataatcccgattaaaacattcccttcaatcttaccaaaagctgggtttactttagcgatgtctgataaaccttgcatcgcttgaattgaagcaggtgccaagattgtcttaggcactaagaaagcgactaaaccagcaagtgcagctgcaccatcttgatccttagacatcccgagtgctaaaccaacggcgaataataatggcaagttatttaaaattgcaccgccaccggctgataagaaaattgtaaagacgtttgcgtttgaatcgccattgccaacccagttcgcaatccccattaaaattgcggctgctggtaaaacagcaactggcaacattaatgaacgacccattcgttgtaagtaattcttcataagtttttctccattcatttttttcgttaatatgattaaatcattaatgtaaacgataagcaagcgcttaacaaccggtatagacctttataaatagcggttgaagcggtttcatgcacacaaaaaatattggtctatacctaaaagttaacaaatgatatctgattcaccaaataaaacggttgcattcacctaccacactctctatactgagggtacaaattaatcgctttgcactaggggtgttcttagaagaactgagataggtttgtacagcctgatccctttgaacctgtaagttcagacttgcgtaggaaagtgcctttctttagactactcacaccacttttctatgcattcgtgcatcgttaagtggtttttttagtttttaagggaggtttttatatggttgtttcactgttagaaaaagttagagcgctcaatccaatcgttgctaatgtcgcaaatggcgtcacaattgatcaggtcgccaacgcacaaaatgcaatcggtgcctcaccaattatgtctaatgcaccagaagaagcggaaggaattgttaccatcgcacaagccattacgattaatattggtagtttgtgggcaccacagattcaagaaatgatggccctaatgaccgccgcttatcaacaacaaaaacccgttgttcttgatccagtggcagttggctcactggcctaccgccagcaaattatcgagcaactattaatacttgacacaccaactctcattcgtggtaatgcaggtgaaattgcttattttgctgggatagattggcaagcaaatggcatcgacgccgggcatggaaatagcgatccagtcattattgctaaggccgcggccaatcgtttacacaccataattttattaacgggtccgaccgacattattacagacggtcaacgcgttacgctgatttcaaatggtacctcactttttcaaacacatgttggttcaggtgatatgttatcgggtctctgtggtgcatttgttgcagttcatcctgcagatccctaccaagccgctatcgaagcagccgccacatttgccgttgccggcgaactagtagccacagcaatggaaacaccgctacctgggaccttctatccccaattaatcgattatttattccacattaccccagccaaagtagcaaataccgtccaactaagtgaggtgcctactcatgaatgaattcccacaagctctaaccatcgtcggttctgacagcggtggtggtgctggtatgcaagctgatattaaaactatccaagagcgccatgtttttgcaaccaatgtagttgtcgcaatcaccgctcagaatacgcttggcgttcaagccagtctgccactaccactatcactaatcaatcaacaattcgcttcattggctactgactttaaaattcgtgcctgcaaaacgggaatgttggcagatgctgaacatgttgcaacggtcgctggaaatctacgccattatgattgggggccgctcacccttgatcctgtaatgattgccaagggcggtgcacagctacttgccgacgatgccatcgataccctacgtactgaattattgccgctagccacagtgctgacacccaacttacccgaaaccgaagttctcacgggcagccgcataaagacaacagctgatttcaaacaagcggcccaccaactccaacaaatgggcgccaagaatatcattatcaaaggggccatttagactatcaatcacaagccgccgattacgtcctctacgctgatggacaagatgaatggttaactacaccacgaattgctactaaacgaacacatggcactggagatacgttttcagcttgtttaaccgccgagctagctaagggcacccctttgaaagcagcaattcatattagcaaagcctttatccaagccgcaattgctaatccgattgctgttggtcacggccacggaccaaccaatcactgggcttatcaggaggttcatcatgactaacatttcccgggaaatgttccaaacttatttggtagcgggtacccaaaataccggtatggatgattttctaaacattctcgaacaagcactacaagccggcattacctgtttccaattccgtgaaaaaggtgctggtagtctgcaagattccgatgcgattttaaagtatgcgacagcggctcaagccctttgccgccattatcaagtcccatttattatcgatgacaatctcgatttagcacttcaaatcaatgcagatggtattcatgtcggccaaagcgatcacccgtggcataaaattgaaacggccaaagcacacggcttaataactggtctatcttgccacactgaacaagaacttcaccaaagtcataatcaaccgatacttgattacattggcattggtccaatttttccaaccaattccaaagaagatgctaaaccagcacttggcactaatcgcttgcgtttcttaacgcagcaaagtgaactaccggttgttgcgattggtggtatcaaccaagaaaacgttgctcaagtcgcaaagactaccgtggatggagttgccgttatctcagcaatcacccacgccacagatatcgctcaagccgtccaagcattacaaaagccatggcaccgcagtactgatgaaaaccaatcgtaattaacccttattacggtttgacccattctgaatagtatttgctgccagtttgatccaccaaacatttaaaaaagccgctagaaccctttttatagagtactagcggctttttcttggtaatttgctgatatttagcttagtgctttgttagtgatgactactccatttaacactactcggtaaacttattcattagcaagggcttcaaaataacttgctttttgctgcgcccagtaggcctcttctgcctcatcaatcggccggagtacccgacatggattaccaactgcaatcacgttatcaggaatgtctttagtcacaactgatccagaaccaatcaccacattgttcccaattgtcacgcctggattaacaaccgtattgccaccaatccacacatcatccccgatggtgattggcttaccatattccaaatcatcccggcgttcttgtgccgtcgttgggtgaccagctgtgtagagtcctacacgaggtccaaagaaaacgtggttcccaatcgtcactggtgctacatcaataatgatgcaatcgtaattcatatacacatgctcaccaatgcgtgtttggcaaccataatcagttctaaatggtggctcaatatataaatctgagccacttttcgcaaataaagacttggttaattcgcgtcggtaatcttgttgttcttcagtggtttgattaaacaaccgagtaagtacgcgcgcgtgtttcatatcggctcgcaattctgaatcgttcgcccgataaatttgaccattaatcatgcgttttttttctgacatttctttatcccccatcactactaaaataggtgcgtcacaattgtggcgcacctttttaatttaccaaattgcaacccgtttagcgggtgctaagtacatctgatcagctttcgttacattaaatgtctcgtaaaaggctgccaagttttggacctgaatattggcccgcaacgcgtttggtgcatgaacatcaatatttaacaataattgttgatattgctttgtagctttcatccgccaaatcgttgcccaattgacaaagaaggctgccaaatcaacatcaggttcttctttggctgcttcaagggcacaactcaagccacccgcatcggcaatgttttccgagacagttaatttcccgttaactgttgcgcctgcatattctaggccatcaaattctgcaatcatttcttccgaaagtgtcttgaagtgagctaaatctgattcttgccaccaattatgcatgttgccatactcgtcgaattgcgcaccgttattatcaaaagcatgtgagatttcatgtgcaatcactgcaccaatcccaccgtagttagcactgctactttgttctaaactgtaaaaaggtgcttgcaaaatagccgcgggaaagacaatgatattcttcgaaggtgaataataggcattaactgtggcagcgcccatttcccacttattacgatccaccggttgagtaagtttcgcaaaattttccgtttcaatcgttcgaataaagtcagctgtattttcaaataatgtcccatcttctgctttaggtactgtgaccaacttcgcaaaaataggggcaatctgatccgggtaaccgacatgaatcccaaggtggttgagttttacaatcgcttgttggcgtgttttttcggttagccagtcatttttttcaaggcgtttttgataaacaccaatcattttttggaccatcttttggacgtcggccttggctgcttcaccgaagtattgccgaccgtaataatcgccaacaacttgattgaacatccctaaggcaaggtagtaagcactcttttgttgtggacgagcttccttgctaccagataacgcacgactatagagcgaactaatttggcgtgcctcttcattcagataaccgctccaactacgaactgtcatgactaacagccacgctttgaacgtttcgaaattggcgtctgtcacaagctgactcagttgcgcaaaatacttcggttccgtcacgataattttttccggttgaacaggtagcaccttgctaaataaacgtggaaaatcaagcgtcgtttgttgttgcataaaatcactcaaaggctgtggattatagagtttcgtgtaatccgctgcttcttcggcactcttcacataaggtgccagtgaccgatcaaatgccaacgctaatttgaccgtcttcgttgcatcaacgggcgcaatcccaattttctgcaagagctgaaccatcatatccgtaaagacggccaataaatggtcagcattgggattgtcagcttcataataggtcttatctggcaaaattaagtcgctagcttccgcatacaacgcgtgatgggctgtgtctttcatgtcagcatcgacagataagccaaatggtgttggtaacccggaaagtacccaatcagctaacccacgattgtaagttgctaaactatcgagagattgcacccgggctaccattggtaggatcggtttcataccgagtgcatcccgcgtttgaaagtccgcagctagttcgtaataatctagaaaatgttgtaacaatgcgttctttgcggtcgacatcttagcaaaatcagccattaattgctgatcaatctcatcaaccaaggcgacaaagccgcctgttgctggtttatccgctggaatttcagccgtttttaaccattcttgattcaccgccgtataaaaatcatcttgcattcgcacgtttgtcatcattgtcctcctcaaaagcagattctttcccaattttaacattttgccactttttccgttaatgctttgaccccataattgcaaaaaagccgcaatttagcggctatttcgttggtaattgtttttcaacttgataatttgaatcttggttaagtttaaacgtcttcttcaaaccgtttgatagatagattttattatcttttgtgatcatgatggcttggatattcttcggtttgttgttgatgagctgcatgccttcgacaatccccttattaaagacagcatttgaaagggcatctccatctactgatttaggcgagataattgtgacactcgctaggttattttcatatgggtagccagtatggcgatcaaagagataaatgtaagtatgcccgtctttttttagataatgttcataaatccctgccgtaacaaccgaaatatcacggcctttaatcgtaccgactgattctccacgcgcctttttcggatcttgaatgccgaccgtccatggtttgttcttccctaatggtgaatgccccataacaatcacattcccacctaaatcaataacggctgatgtcacaccattttccttaaaaacttgtttaacttgatcggcaatgtaccccttagcaatcccgccaaaatcaagtcgcatgccttttttcttaaggtaaactgtacgtttggccttattcaaaacaacgtcatgataatcgactaatggtaacgcttggtcaatttctgcttgtgctggcacccgcgcgcctggtaacccaatttgccataaatctgtgattgcaccaatggccatatcaaacgcgccatccgattcttgactataatgtaacgctttttccattagtggccacatatctttgctaacctgtacagatttaacaccggcattatcattaatcttatccaattcggaacctgatttggttaacgttgcttgattttcggactttttaatccgcgcaaaagccttatctagcacggcttccttgtctttattatagattcgcaatgtacaaatcgttccgagatagtaatcacttttttcatagggctttttgaccaacgtttctttgtccgctggcttactttgacagcctgccaataccagtgtcacccctaagagtgccaatccgaattttacccatcgtttttgcatcgttcaatcgctctccttgctactaaaatcacatggctctatcataccatgaatccgctttaattggttgtaaaaatcttctactggcgcgattctttgagttgctgataggtggcaattaatgctttaaaaacacctttatccgaataaactaaaatattcatgcgatagataattaatgctaaataagtcagtccaattagtgtcgccatggctatgaagagtcccatgctagccccgaacgcgccaacatcaccgtttgccagccgcacaggtaacataatctgtgaaaacaatggcacatagctcaccgcccgcaataatggaatatcggtctgtgatgccagtaaaaagccacccaaataacttaatgtgcccagtaaaatcaatggcgaaatggcttgttgtacctgatccattcgagacacaacagcgcctaacattgcagctaatacggtgtagagtaataccccaataattaaaaagactcctgcataccacattgctggcgcaaccaaagcacgacgaataatcggcaataactctgctaacggtagttgctgtttcaaaaactgaaacccgacaatcccaactaaaatatagacagtaatttgggtgagtaatagggctaatatcgcggcaatcttcgcgaaaaattgaatttcaatcgaaacacttgatagaatgatttccatgattcgcgaccctttttcagtcgcaatttcttgggcaatcattccagcataattcacgataaagatgaacattaagaccgtaattccaattgaaataatttggcccacttctttagtgttttcctgggaaatcttttcatgactattctggtaattaaccgtcactggtgcaatgacagttggcgtcatcaatttctggatctgttcaggtgcaacgcctgcttgttgcgccaaagctactaaatgaatctgatttaactgattctctaagacactcgcatcaaatgatggactatcttttcgttcatagtagcgactgattgtctgtcctttttcctcactcaacaacaaatagccatcaattcgctctttctggagcgctttggtggcttgttcccgagtcgtaatctgctgattgatttgatatattttaccttttaactgctgtaattcactctgttctgctggttgcggcgccaaaacagcaattctaacgggttctttgctatgatccatcaagtgactcacaccaaacgtaatcccgaacatcacaattggcattaaaatcatgattagatacgctggacttttaatattctttagaaatacttgtttaaaaatcaccttaaacttaaacatggccttcctccactttcattctaaagatttcatcgagcgttggtgcttgttgactaaactctaggatatagccattttgtgtcgctaagtcgaaaatcgttttaccaaccgtttcgtctgccaaagttaattcaaaccgctgcccgtgctgtgttacacgtgaaacaccgttgatatttgctaaagtttcgcgtgctaacggtgcttctaagaataattgcgttcggccaaactgattccgaatttcatcgattgtaccggcgagcaccacttgcccatcgcgcaacatcacaattcggtcactaatccgcgcaacattcgtcatatcatgactcgaaaaaatgattgctgaaccttgttctttaagccataaaataccttcttctaatagttctgcattcactggatcgagtccactaaagggttcatcaagaataatgagttccggttgatggatcaaagtcgcaatcaactgcactttttgttgatttccctttgaaagatccttgattttatcagtccgcttacctttcaccccgaagcgcaccaaccactcatcaatctgtggtttgatgtctgcgatgctgcgcccacgaagctgtgcaaagtacaaaatttgttgttccacggtcatctttagatataatcctcgttcttctggcaaatagccaagttggtcataatccgcagcggtaaacgcgcgacctttccagagaatagttcccgtatctggtgccataaaattcaagatcatccgaaaggtcgttgtctttccagctccattttgaccaattaagcctaatatttcgcccgacttaaccgtaaatgaaacatcgtcgaccgctagcatcgttccgaaacttttggataaatgtgataaagtcagcacgtccccaaccccctacttttcattaccttaactataccgtattcatttagaaagcgcattatctctcaatgaaatattaaaattactgattaaatcttaatagttgaaaaatatttgctatactacaattatttattaattaggaggtattattttgtccccaaatcaagccttttttcttactgttattggttgcctgttagctatcagttcatcttattttatcgtgcgtctcaatatgctaaagccaacactcaagcaaaatttcttggaccaatatcctgacacggatgaccaagcttacaaagtgcaacaatcaatgaaacaagcttatttcaacgcatccttttacaagcaagctgttcctttaacatcttggttagtccttttattctttttatcaatcggtggctgtctaacagcgctctatctagatgccctgaacattgcaatccgtcttttggggagtgcattcatttttatcgcgtttctctaccttaagttgccgacttttcaagcacagcatactttttggaaagcctatctacaagcgcatcctgaaaatgaattaaaagtcgtcatactcccactcgattcacccattcaacagcggcggattgccttactcaccaaatttaaatgttgtactcttgtagcaggtctcatattgttttacgcctctctttttctataactcaaaaagcggcaccaaccattttatggttggtgccgcttttttaattaacgaatttcaattgggttcgttggttggtctgattcacttaacttcggtaacattaattgtaagacgccatcttgatattgcgcatcgatttgatcccggttgacactaggtaggtagaattgccggctaaagcgcccataatgccgttcgctttgaacgatattgccttgactgtcactatgatcagcgaaactatcacgtttagcactaatcttcaatgtattatcttgataatccacgtgaatatctttcttgtccagtcctggtaaatcaaccgctaattggtaatccttatcggtctctttaacatctgttttgagtaagttgtccgtttcaggcgacattgccaataattgctgaccgaaattcttgaaccaatcatctccaccaaaattatctagccaattttgacgaccattcattaattcgtttgccatctctaaaacttcctttcttaatctttacaactctattctagtccgttaatcatgaaatgcaagtaattagcattcgacgttgttgagtgccaatttttaaactagaccactgatttttcagctttttgatacccgcctaatatggttttgtgctatacttaaggttccaaaaatattcggaggtaggttcatatgaaaattgttgtcttagcgggcgggcgtagtaccgaacgtaacgtttcattaacgtctggacacaaaattaccaatgcattacaaacgaaaggccatgacgttgctttcgttgatcttttcttaggaaatgatttgcacgacgtcgcatcaatcgatgatctttattcttcaacacctgttgaaaaagattacgacatcagcgacgaagttttaacagacgacgccatcaacgcattacgtactgatggttcaacacaactctttggcccgaatgtcttagagatttgtaaaactgctgatattgtcttcctcgcacttcatggtggcgatggcgaagacggtaaagtccaagcggttctcgatctctttggaattccttataccggtagtgacacactcgcagcaggtattacaatgagtaaaaaggtttcaaaggaaatcttattatataaccaaattccaactgctcggtttgtcgctgcttatcgcgaccaacccatgccagaaatcccatttgagtaccctgtcgtggtaaaaccaagtaacggtggctcaagtgttgggacgcatatcgtgcacaacgaagctgagttacaaccagctgtcgaagatgcacttcgtttcgaccgcgaggctttaatcgaagaattcattaaaggtcgcgaattctcacttggcgtgattaatggtcaaccattacctgccattgaaatcgtcgttaatgacggttggtatgactttgagcacaaattcgtgactggaaataccactcaatttgtcacaccaccaaacgatttacctgatgatgtgcacgaagccatgaaacaaatggcacttgatgctatgcaagcacttggcttaacgaactacgcccgcatcgacttcttctggagtcctgaaaatggcttacacgtgatcgaaggaaatacattacctgggatgacgccactttcattaattccacaagaagcagaagtgcttggtatcagttatcctgatctttgcgaaatgattgttcaaggtaaattagaactccttaaagcaaaatagccaataaaaataaccctgtcgacgattttcagtcgacagggttatttttatttggttcatttaaaactgattacttagttcctgattaggaactattcttaaaaaaacacgtcgattggaattcccaagcggtcatgtagtaattgaatttctttgacggtaaatggaatcttccctctaatcttacgattagccgtcgttaatgttttgcccaatacatcagcaacaacttgctgtttcaaatcatgaccctttaaataacctgatagaacaaataatttttctgccacattcagcacccccaagaaacgttatcaatcccgttccacattaggaatattacgataatgtaagaactctgtcaattaaaaactttagtcccaagtgttcacttattgacgtcatttgtcatataattaaacttataagtcaaacgcgtgataaaggacggtgctaaatgttcggacaattattacacgataagcgaactgctaagaatctaacaatgcaacagctcgccgatctactcagcgcaaaatataataccaagattagtagctcaatgatcttccggtgggaaaaaggcgctgccccatcactaaaagcattatttattgttgctgtcgaattgcaaatcgaccttaaccaattggccacccttgttgcggattctaaccgcgtcaattagccgcttttttttgtttttttcccgatttttgaatggtcttcacacctagtacatctaaaaagaacgtaaagattggtaatccaacaattaacccccaagttcctaagaaacgttctgctacaaataaaacaacaaatgtaaagaaaattggcagctgtgttttactcgacataaatcgcggattcaaaacatatgcttctagggcatgaatgactaaaatcatcaccaatatataaaccacatactgaattccgccgactgaaaaggcgataatgcacaatgggatacatgaaacgatgactcctgcgaccggtaccatcgacaataggaaaatcatgatggctaaactcggaatattaggcattttcattaccgttaacgtaatcgttgttaacactgtattcacaattgcaatgaagatttgggcttcaattaccacgccaaaggtattcacgaattttttagcaaaatacatgatatcttggaagaaccagccgtaagtactcttcaaaaagagttttccaaactgcggtaatcggtctagctcaattgtgtaaaagaaactcaaaataaacgataagacaattgtgacgcccattgttccgattccggtgatgtaattaacgattgttgatacaccgtgtttcaactgatccgtcaagttgaactgtttcatgtaatccccaatggttcgcataaattgattcgcatcaaatgatggactttggtagaaattatagacactctcgcctaatttaattgactgtttagcaatctgtggcacataaatcgttactgctagatacactaaaaaaatcaccaacatataaagcggcacaaccacagctgcgggcggaatttttgaatactgttggacctttcgtactaattgagtcactaaaaaagtaaagatgaacgtcagcaaaatgatattcatcatcgagcgtgacacatagatgaccccaatcaacgttaagagcactacaactcgtcttaactgctgattcgtcacaaatttttgatataaactcacgcaatttcctcctatggcaattctatatcattattttacaacacttcgaactaattggatattctggaattccgatagttgcaacttacatctttttaaaaatagtcgtatactactctggtacttcaaatttacacctagaaaggattttcggtatgttagaaaaaactttttataagaaactactacaacactcttttgatttccctgttaccgtcaactattgggacggcagctccgaaacctatggttctggagagcctgaagtagcgattacttttaaaaaagcgattcccatcaaacaattgtccagcaacgcatcattagccctcggcgaagcgtacatggctggcgaccttgaagtgacaagtaatacaacagataccccacttcaaaaactattaacggcggcttacactagcgcagacagtttcatgcgtaatagtcgctacattcatctgattccaaaacaatcgcattcagaaaaggcaagtaaaaaagatatccaaagtcattacgatttagggaatgacttctaccaactttggttggataaaacaatgacttactcatgtgcttattttgaaaaaccaactgatgatttagagacagcacaaattaataaagtgcaccatattttacgcaagctcaatccacaacctaaccgaacattgctcgacatcggctgtggttggggcaccctcatgttaaccgccgctaaagaatatcatctcaaagtggtcgggattaccttgagtcaggaacaatatgatttcgttcaacaacggattaatgacgagggccttagcgatgttgctagcgtccaacttgttgactatcgcgaactcaaacacgccccattcgattacattaccagtgttgggatgtttgaacacgttggtgaagaaaatcttggtgcctacttccaagatatcgctgactacctcactgatgatggggttgccctccttcatgggattacccgtcaacaaggcggtgcgcgcaatgcctggattaataagtatattttcccaggtggctatgtacccggtttagttgaaaatacacaacacattatcaatgccggactacaaattgccgacatggaacccctccggcgccattatcaaaaaacgctggaaatctggactgctaattttaacgcccaaaaagacgtcattttaccaaaagcaggtccagaatttgtccgcatgtgggatctctatctccaagcatgtgcctcatcgtttgaatctgggaacattgatgtcattcaatacctcgtatcaaaaggccccagcgcaagagacctcccaatgacaagagaatatatgtatgattagagtgctgactgtcgcgcttagtcattgagcattaattcaaaaataacataaatccaggttttaggatttatgttatttttagattaagcggaaattactgcgacaggaagcacgtttagagtgctgagtcgaacgggttggctttgaggattacccaaaaaagacccgctaatcaacaatgattagcgggtctttttttattgccttattttaaaagcgcttctgccttttctctaacttccgcgtcgctcatcttaagatagggtttcattgcctcaacggttttatccgtgttccggccgttggcttccatatagtgatcccacaaagcatcacggacgattgtgttatcgtcactccaatcaaatgcttctgacatcttcatatctaaaaccaatgttttttcaacagctgctgccatattaaaaacctcccatttcttttttacaactctaatgataaacctcttttgaaaaagtgtaccaaaatacgcacttttattttttagagtcctgttagtaggtttaaaatcacgatttggctaatgccaattgccaagacaacatgggttaagatttcaaataataaaatagcatagacgcgatcaaaagctgcccatcgagtttgaaataaactaatcccaaccgcaatgttcaaactgacgtacatcactgcaaccatgattaagacgaaccagatggcggtcatcccgaaacatagagcagccaacagcgcagctaatgctaaaatgacgattatcccactgtacgcactaatctccgttagatacgcgcgcaaggtggttgtcgtcttcttcaataagtaacgcttgagtaaaaagccgattcccaaaacaaccaccagaataaatagttgtccaccgagtgccttcatatcaagcggtaataagtttggccgttggcgcaagacaatttgtgacgccatcaccccagcaaccgcaccaatttgttctgaccaactggcaatgagcaaacttgccgttgcagtattcattaatataaccagaccaaacgtgactaagccaaaccacaggttggcccactgccattgcacctttagcggttgttttaaactccgcgctaaaaattgatagtattgttgcaggagcgatgtttgctgttttgtttgcgttgattggtgcactagaccacaattgggacattggtgcaatttacgcccatatttaatatggcattgtgtacattctatcattcgtctgatctccaaatacttaatttaccgtacaactgtgactgaacatggcgcgtatttcgctaaatagctcgcatgtgtcccgattaaatgtttagatggtttcgtctttgaaccacagatgaccaagtctggttggaaactaggaatcacttcttcaacaatcacgtgtcctggattaccttcatttaaaatcggcgtcacatcttcaaccccgaattctttcgctttttgaacataaacatctagatcggctgcgatttcttctcggcgcccttcaaccacgtttggtgagagtgattgataaatgttcaaatcgccggtttccaaaatgctgacaatccctaatggaatttgataggccttagcaagcgtacaagcatagttaaaggcccgtttggatgaggttgtgtcatcatcatcgatagcaattaataatttttgatagtgcattgattcaacttcgatatttaattggcgtttttctgtcattagttaagactcctcgtttatttaatcaataatgcttctttggcatgaattaattccgtgattaattggttgactgggatcgcaatgtgcttttcggcgcctttgcgtgccacgtaaccatttaagtaatccacttcggttaagcggtgatgttgcactaaatcctggtgcattgaaggataatgaccacctgcttgttctggtgcaaacatcttgctgatgtgggcaatcgtcgtgggaatgtctaattcaacggcttctgttgcagcaaccgctgagaattccgccacaattgaacgcaagagttgttgtgcttgtggggtttggcccaattgtgcaatattacagtctaacaaggcacacaagctgttcagtgtcccattaacgcaggctttacgccagattgaaaagagtacatctgaactatattgcgcatttaagccagccgcactcaacaaggcaactaatgcttgtgccgattctttgccatctggatcaacattttgtaattcgacattcccagagcctgttaatgtaatcgcacctggtcccgttaaccccgccgtccaaagtgtaatgccgacaaaaatattttctttgggcaggtattgttcaatcgtttcgggatgcccgagaccgttcaataaacagactacttttgtcttagcaccgattaagggtttgatggcttgtaacatgtcgactagctgcatcgattttgtgaataaaataatgacgtcttgaacttctttaatatccgttggcaaagcagccggaattcgaacctgaacgggttcgtgccccgcttctacaaccgtcaggccattggtattgattgcttgaacgtgttctgcccaattatcaagtaacacaacatcatttccagctgattgtaacatgtaaccaaaacgactgcccattgcgcctgagccagcgattgcaatttttgtcatagattataaaagctccttttatgatttgaattctttttaatcatgccacatttttaagattttttcacccgtaaccgcttaattcaacttaaaaagaagctgtcaaaccgcttatagcagcctgtcagcttcttaaaataggaatttacgccttcttaaaattaattgatcaatcaataataagaccaagctataaccaagactcattgcccatgataataaaatatcaactagcgaaatgtgtcccaacgtgttgaagagttgcgccatggtcgaaacgggtggcaaaatccccagaatatagaggtagggatgccagtaattgacaatcgcttcacctaaactgccgagaaccaccatcaagatggtcaacgtaccggccatccggcgattcactaaaattcgccgttgccagaacaaaccggtcattactgaaacaggtaaaatactcgtcaacattaaggtcccgcctagccaatcccaccagctaagtcctcgaccaaaagcgtggtgcccattgagcacgtaagtaattgccaagcttcccatcccaattaggacaaagaataatcccaacaagatgagatagctaattaaactgagataaaaacggcgttgcttctttaattttaaaattaaaagtttttccatttgaaggggaaattgattgatgtaactgtaggtcaaccacgtcaataagataaacagtgtcattaataatgtagcgaggctgccgacgaaatcttgtggttgcaccgcataattgactaataaggccactatccaaaatagcaaaggcccccacaaattcccattatcaaaaaccattttctgatgcaaacgtaactgtgcactaaaggacttcataacgtaacccccttaggctaaagccactttttaacattgcttgaattaattcatcactatttttgatatttgcatacaagacgacgtaccgcgtaccatcaacaatttttaaagctaactgttgtaaagtagcgggaagtgcgagtgatcgcggtgtagttgcaaattctaaccgcatcaccttttcttccggctgcggtaattcttcaatcggcaatagccgcatcgcatctagttcataaatttcagtagccaactgttcgattaaaaaagcgttgttagtgccgacaatgatggcgcctcctttttggcggtagtctttcaaccaatgaatcatccgcatctgggtcgttccatcttgaccagccaacggttcatctagcaataaaatatctggggtccgcaaaatcgcctgcacaaagttcactttttgcagactaccgcgtgacaattgatttaacggtgtattaagtgccgccgctaacccaaattcataggctaattcattaatctgaccttctaaatttcgattgctaaactgatctaattctcctagcatccgcaaataagtcttagatgtcagtccatttggagcgagttgttcagccatatagccaatccgcatcttcggtgcaatctccagtgtcccgcgttcaatattcgtcaatcctgctagtacgttaagcaacgtggttttccccgcgccgttttgcccagtaatcgcgatacaagcttgccgatcaatccgtaaattgagacgtttaaaaagttgtcgccgctgatatttttgcgaaaaatcacgtaattctagcactgctcccatttaacttgccaacctttactggattattttgcttgccaattagcgatgttttgcgcagccaaagctaaactcaacacagcatctttagacaaatcagcttggattaagttatgtttaacggttgcagccactgcaccaatgacagccaaaccatatgtcaacacttctaaatcgcgtttaacgagatattgatcttcataaacagcttcgtggctgtattcaaagttgactttgttttcagctaaaacaccatccacgtgggtcaccataatccgatcggtcacatcgattaataatttgtggtcatctgataacgttaatttatgatctgactctgattgataatatgtttcttctgtaatatcaaaatatttaacgaccgggttatttaaaacgccaaaatcatccaaaacagcaaaaattgtttctggatttaattgcactttgcgatcggcaattgctgccatgttttcttctaaccaatctgctaattggcgaacattatcctgtgtcatatgtgggactcctttaattaatctaaatgaattctatccctccataatacaccatccgcaatattagcgcgactgactgcaccaaaaagttactgtgacatcagatgatcatcaattacgccagctccttgtaagaatgaatagatgacgactggtccgacaaattgaaagccccgccgttttaaatccttgctgatttggatcgatagctctgattttgcggggacatccgcccaagttcggggccgatttacaattggctgtccatcaacaaagccccatagatactgatcaaagcttcctgcactcttttgtaacgcaaggacggcttgtgcattattgaccgttgcattcaacttagcacgattgcggataattgccggattggtcagtaactgctcaatttcggttggtgtcatctgcgctactttggcaatttcatagtctttaaatgctgtccgaaaggcagcacgcttatttaatacagtccgccaactcaagccagcctgatacaactccatacataatagttcaaataagcgttggtcatcatgttccggttttccccactctgtttggtaatacgccaataattcaggtgaatcatacatccaatcagcttttgtcattattaccacctcctaaattgaactacgcaaaaaggctaaaaagaattcatcctttttagcctttgggattgttatttattttttcttacttgctttttgataagggcgattttcaacatcagtcttgacgattaacacgtcacagatagctgtgcggttaacatattctgtcacagaacccatcaacatccgttcaactgcattcaagccagtagagcccatcatgattaaatcggtttgatattctgtcgggaagtcacgtgcgataacattcttaggattaccaaaccgcacatgaatctcgacatctttcaaaccgtcattggtttggatatcatattttaaactgttgagataattctgtgcatcttcagagatttggaaaatagcgtctcctgaaagcatgccgctataactccctgcaaattgcttggtatccaaaacgttcaaaatatccaagcgcgcctgattcatcttagcaacccacactgctttatttagtgctaattcagcttcttcagagccgtcaactgggacgagtattcttttatattcttgaaccatgttgttcatctcactttctctatatgcacctgttacactttaagaatataccgcttggaaaaacaattcaagcaaaaaagcgaagcgcttccgcgaacatttaattagaagtagtctttcttttttaaccaccaaccgacacaaaggctaatggctaatgacaatcctaatagcacgagaaaccctaacttactctcggctagcgggaccggtacgttcatcccccagaaaccacctaacgttgtcggaaccgttagaataattgagagtgatgttagtgtcttcataatattattcaatcggtttgaaataatatctgaaagcaaatcacttaactgtgccaataactcacgatacgttgtaatcgccttatcggacttggcaaactgcaagtcaatccgatacagtaagtctgtatgtcctgacacgcgctcaaataatggacttgccttaatttgcggaataatttgctggttactcttaagccctaaatccaaatagacaacactctttttaagagacttgagtgcatacaacaaccgattgcgtgtcgaaacatgtacattttcttccaattgttcaatctgttgcgcaacgaccgctaaagccgctaaataacgttgatagatggccgaaacactctttagagcaaccgtttcaatttgaccatccaggccttctaacgtgagtatttcatcgatgagctcggactgttgatgccccacagttaataacgtctggccactaatgattaacgaaaaaggccgcgtaatatattccgcatgatcttctgaatcatgggttttaactggtaccagtaaacaaatatgggtcaatacttcaccggtgtccgttgtaaatgtttcataccgtgcgacttcattgatatcttgggccacctcaaataacaccgctggtaagtggtattttttagcgaaatggtgcatctcatgtttagttggtgcttcaaaatgaatccagtcggcacttttttcagaggttccttcaaccaactggccctcaggtgtcatttcaaaatacgtaatcatctgctcactccactcttaatacccctatcatactgtttctccccacatactgacaagttaagttgattgcccattaaatatgctacaatattggtatcattggataaggagttgacgcatatgacacaccgcattttgccacttgaaaaaggccataactttagagaattgggcggctatcaaacaaaagacggccggacccttaaatggcataaagtcttacgttccgctagtctagcccacctaacaccacatgatttagcttatttaactgattatggcgtgcgctatgatgttgattttcgctcacctgaagaaattgccaagtcaccagacaaggtccctgccaatgcaatctatgaatccttacccgttttcaaaattgatgaaacggctagtacggcatcagaagctgatctttttaaaacgttcagtgctgatccaaaaagtggtcatgaacatatgattcaagtctatgtcgacttaattaaccaagatcactccaagcaagcttaccggcaatttttcgacttgttgctagcaaacgataaggaggaccaatccttactgtttcactgcacggctggtaaagatcgtactgggatgggcgctgttttcttgttgagtgcactcggtgttccagaagaaacgattcgcacagattacttattaacgaatcaagcttctgccgctttcgtgacccaatcgcttgcaaaactacaacaaaaaacacagaaccagtctgtgttcaaaagttatcagtcattactaacggttcatcaagattacctcgataccgccaaacaagcgattgaatccgaaaatggttcgttgcaagactatttatcacacgatctccagttaagccaacacaacttagctgacctgcgcaaaatttatttagcataacccatttgtttcacatgaaacttaaaaaaggagcgtggctttgaatgcccactttaaaagaacaagtgattgaggcgagcaaaaccatcggcatcgataagattggtttcacatcggcagcgccttttgattatttagaagcaagtcttaaggaacaaaaagcaaatggtcattcgactggattcgaacataaagtgcttgaagaacgcctttatccagatttaattttcgaccaacctaaatcgattatcgcgattgctcttgcctatccaacaaaaatcatcaataagccagcgcgaactggtgctaaacgcggtagttttgcccgcgcttcgtgggggattgactaccacgatattctgcgcgataagatggaccagctgatcagcgctatcgaaacacttgctgattcagatactgaaattacttttaagccaatggttgatacaggcgaactgagcgatgtggctgttgcgcaacgtgctgggttgggcttcatcggtttgaatggtttattaattacacccgaattcggttcttatgtctatcttggtgaaatcattaccaacatcccatttgaaccagacacaccgatggccaatcaatgcggcagctgtacgcgctgcatcgattactgtccaccacaggcattaatgggcgatggccgcctcaatgccaagcgttgcttatcctatcaaacacaaaccaaagggttcatgcccgaagaattcagaccaaaaattcgcagtgtcatttacggctgtgatatttgccaacaagtatgtccgtttaataaaggaaaagacttccacttccatcctgatatggagccagatccagaatctgtgatgcccgaattacagcccgtgctaaccattagtaacaagcagttcaaacttcaatttggacaccttgctggttcgtggcgtggcaaaaagccacttcaacgcaatgcgattatcgcactcgccaacgtgaaagaccgcaccgcgattccgaagttactcgaactcatcgatactgatccgcgccctgtcattcgcggcactgctgcttgggcgctcagtcaattagtgcgcgatgtcacgcctgaaattttagactttctagaaacagccgcaaagcgtgaagaagaaccggaagcccaagttgaattcgacaatgcacttcaaattctaaaagaacgttattcagagaggtaggtccaccctagtatgtcagaaagtgctccgcaaaaaacagtccttacgcagccattaatccttttgatggcttttattaccggcgttgccgtctccaatctatattacatccaaccgattcaagcactcgtagcgaccactttccacgttacaagtggtgcggtcgggactgttgcaatgttgacacaggtcggttatgcacttggcttgttgctgattgtcccgtttggtgatgtgatgagccgttaccagctcatattacggatgcttggcttatccttactatccttattagccgcttacctagcacccaatttcattttctttgccttgactggtttgatgattggcctcacctcagtggttcctcaaatcatcattccatatgcagccgtcctcgctcaaccacaaaaacggggcgcagtgctcggcaccattctcagtggtcttctaatgggtgtgctcctatcccgaagctttagcggcattattagtagttacattcattggcgttgggtgtatctcatcgctacaattgcgattgcgcttttaatccttctggcaaccctcaaattacctaaggattcccgtccaaaaaacgggccaagctactggcagacaatcagttcaattccagggcttatcgcgcaccagcggctgttacgggaagccgccatcaacggttttttcatgtttgggacacttagtattttctggtcgacactcattttctatatggccagtcccgcctatcgtctcggtagtggtaccgttggtctattagcaatccttggtgcggctggtgctttagctgcaccaattatcggtcgcttagccgatgctaaatcacctcgctttattatcgccactggcttattcatgatgaccatcagttatcttttattcttattctgggggcatttcatgccgattctaatgctcgggattgttttattagatgtcggaaaccagtgcggtcaggttgccaatcaaacccgggtccaaatgcttggtgaagccactagtagtcgcaacaataccggcttcatgtttgcctatttcatgggtggtgcttccggttcattctttggcgccctcgcttggagcttcggtggctgggtcgccgtttgtctcttagcgttagcttatcaatgtctcgctttaatcgcccactttattctttatcgtcctaaatcaacaggttaattaatggccggtgtaacgttctcaattccgttacaccggctttttgatacctatcagtaaggcgtattcattgacagttgcatgttacgtatctaacatagttattatatagcaataaatttccaatcatcacaataggaggttccttatgacacattatctaacgtttgatcacgtttcaaagctctatcgcggtggtaacaaagccgttgatgacatcagttttactgtcgacaaaggcgaattcatttgtttgattgggacgtctggttctgggaaaacaacaaccatgcggatgattaatcgcatgattaacccaaccaaaggaacgattaccttagatggtgaaaatctcgctaatgtagaccccgttaaattgcggcgaaaaattggttacgtcattcaaaatattggcttaatgccacacatgactattcaagataacatcacaattgtccctaaactcttaaaatggtccccagaaaaacgccatgcaaaggcgctcgaattactaaaattagtggaaatgcctgcggactttttagaccgttacccaagccaattatcaggtggacaacaacagcgaattggggtgattcgcgcacttgcagctggacaagatattattttgatggacgaaccatttggtgctctcgatccaattacgcgtgaggcacttcaagacttagtaaaacaacttcaatcagaactcggtaaaacaatcgtctttgtcacccatgacatggatgaagcactcaaattagcgtcacgcattgccatcatggataatggccaaatcatccaaatgggaacgcccaatgaaatcttgcgaaatcctgccaaccaattcgtcgaagacttaatcggtcacgatcgtttgatcgaagccaaaccaaatgtcgaaactgttggccaaatcatgcttaaaagtccagtcgctatcacaccaggtaaatcattagttgatgcgattcgcttaatgcgccaacgccgcgttgataccttactggttgtcgacgaaaaccaacatttaaagggactcgtcgatattgaaaatatcgaccatcattacaaagacgcaactagtgttggtgacattatgtctaccaagattagttacgtgaacgaaaatgatttggtccgggataccattgaacggattcttaaacggggctggaaatacgttcccgttaccaacgatgatcatcaacttgttgggattgtcactcggacagccctagtcgatgtcgtttatgatgctgtctggggtgatactgacgaatctgaagcagaatccgaccaacaatagaaagggaggaatcgatgatgctcacttttttaacagaacatggctctgatttactgattaaaacttgggaacaactctacatttccgcaatcgccttagttctgggcataatagttgcggtgccccttggaattgccctcacccgatttcctaaaactgccaaagtagtgattgccattgccagcatgctccagaccgtcccctcattggcactattggctttaatgattccgctctttgggattggcaaagtaccagcaatcatcgccttatttatctactcactactccctattttgcggaacacctacatcggcatgaacgatgtcgatccgattctaaaagatagtgctaaaggaatgggcatgacgccggtacaatcaattatgcaagtggaaatcccaatggcgacccccgtgattatggcaggaattcgcctatctgcggtttacgtgattgcttgggcaacccttgcttcatatattggcgctggtggtcttggcgacttgattttcaacgggttgaatcttttcaaaccggatttaatcatcggcgggacaattcccgtcacattgttagcattgctagtcgattttggcttgggccggttggaaaaacaactgacccccgctgcaatcagataaggaggctcctatgcataaaatacgccgattcattacgagttgcggattattagttggcagtctcctcctgttaagtggctgtcagtcacttggcatcggaaaccgtcaatcacaaacaattcgcattagctctttaagcaccactgagtcacaaattctcgccaatattctgagcgagttgattacccacgaaacacaaaataaggtcactttaattaataatctgggttcttcaacggtaacgcatgaatcactaattcgtggtgacgccgacatagctgctagtcgctacgctggaactgaacttactggtactttaaaaatgaagcctactaaagatcctgaaaaagcccaaaaaatcgttaaaaaagctttcaaagatcgttacaaccaaacatggttcccttcctacgggtttgcggacacctatgcctttatggtcacccaggaaaccgccaagaaatatcatttagaaaccgtcagtgatctcggaaaagtggcggatcaactaacagctggtgtcgattccgtctgggtaaatcacgaaggcgatggctatcccgcatttaaagaaacgtatggctatgatttcaagaaagttgcgcccatgcaaatcggactggtttacagcgcactggcggctggtaaaatggacgtcgttttaggttactcaaccgatggacggattaaaagttatgacttaaaagtcttaaaagacgatcgccgcttcttcccaccatacgatgcgagcgtggtcgccactgatcagattctcaaagaacagccagcactagcgccccttttacaccgtctagatggcaaaatcgacctcgacaccatgcaaaccctcaactttaaagttgataatgatctactagaacccgcagtagtcgcaaaacaatttcttcaggaacataattatttccggaaaggagccgctaaatgactaatttaaatacttggcaacaacttgtctattatttccagcataatggcagttatgttttacggcaatttagtcagcattttttgatttcgatttatggcgttttacttgccgcgttgattggcattcccttggggatttttattgcgcaccggaaaaagctcagtaatgttataattggggtagcgaatgtcatccaaacagtgccttcactcgcaatgctctcaatcattatgcttggcttggggcttggcacacgaaccgtcattgcgactgtctttttatactccttgctcccgattatcaaaaatacttacaccggtatggagaatgtttccgataatattatcgattccggaatcgggatgggcatgacaaattggcaactgttacggatggttgaacttcccttatcattggccgtcattatggcggggattcgcaatgccttagtggtcgccatcgggattacagcgattggcgcgtttgttggtgccggcggtttaggcgacatcattattcgcgggaccaacgccactaatggcggcgccttaatcttagctggtgccctgccaaccgccctgatggccattatcgctgatgtgacgttaggctttattcaacgccacttagaagctccacaagcacgaccttaaatctcaacattaggaaggtgtcactatgaaactgtatcaagcattaacccaagtcacactaaacacacaaatggttgacgatttacctgattttcagattacaaccgttttagaccaaccattgaactttgcccctactcagctttaccattatatcgatgccgttttaaagagcggttctcgtcacgatgaaaataacctgttatatgtcacagacgcgatttttatcactgaaaactacaactttaaacaaactgaatttgcggcacttgccacaagcttcgaagaacgggtgacattagcgcgtaaaattgtggccgatctcaaccgccacgtctccgtcaatcttgatttagtgcaacacgaattccaattaatttttgtcgattagcaccactgccctaggcgatgttatttctacatctactggggctttttttattgaaatgaatgaacaggagtcctcactttgccaaatgcacagcgtcaaaatagcgcgctttacaaactcaatcgtcccgccaatcaactaacaccggaacaacaagcactacaagaacaagtcattcaattttgtttggcaaacgcgcacgccgaacacgccaccttcttgattcaaggtgcggccgggactggtaagagcgtgattctcagcagtgtcttcaaggcgttgcagacacttgcgcgccaaacacctacctcgccactctatggcagtcaaaacgtcctattggtcaatcatccagaaatgctaaaattctacaaaagtggcacaacaacggcccccgttttattgaaaaaagattttcaacgcccaacgacattcatcaatcaagcggctaaaaaccaccaacttgccgatatcgtcctcgttgatgaggcacacctactgttaaccaaatccgacccctatagccacttcaatcaaacaaatcaactcgatgaaattcgccgacacagtcggatcaccattctgatttttgatgaacagcaagtgcttaaagtgaagagcttctggcaacagcaacaactccgccaacgaattgaagctgctccccatcagaccgcgcaactaacccatcaatttcggatgcaagcccatccaagtgttgaaaattgggtgcaaacctttcatcaacaacaagtcgctgccctgccacatgatccacactttgaattcaaaatattcaccgatgccaatgagctctatcaaacgattcgctttaaaaaccaaacgagtgggcttgcacgcatgctagctacttacgattttccagcaacactcaatgatggtcacgatcacttcgttgagacatcgacattcaaattacgctgggatcggtatcagccaaccgctaaaacctattgggcagaacgtgaagatagtatagatgaagtcggatccgtgtacaccattcaaggctttgatctcaactatgccggcgtcatcatcgggccatccgtcacgtatgatccacaaagtgagcggctagttattcatcctgaatattacgaggaccaagccgcatttgccggcgcagcacagctggctgatcctgaagccgcgaaacagcaaattattcttaatagcctctacgttctaatgagccgcgctagaaacggcctttacctctatgctgttgatcccgcacttcaggccaaattgctcagcttatgacaaatcgattttatttcccggggaataagtcagttttctgtctatctctatcgaaaacaagtaaactgtaagtagaaattttaaactgataaaggagtgttttaatatgtctaacttaacgagttcatacacgctcacaaacggcgtgcaaattcctaaaattggcttcgggacttggcaaacaccagacggtcaaacagccgtagctgctgttgaagaggcgctcaaggcaggttatcgccacattgataccgcccaagcttacggtaatgaagggagtgttggtgaggccatccaagctagtggcgttgatcgttccgatttattcctaaccaccaaaatctggaatagtaatcacacttatgatttaacaatcagctcttttgaagaatcactcaagaaattacaaaccgactacgttgatttgctcttaatccactggcccaacccaattgcctaccgtgatgattgggaaacagccaacgccgaaacatggcgtgcaatggagatgctctacaaagctggtaaagtccgggccatcggggtcagcaacttccgtgttcgccatttagaagcgctcaaaaagactgcaacggtacaaccaatggtcaaccaactcttcttagcccctggcgaattagaacctgaaactgcccaatactcacgtgaacatggcatgttattagaagcttatagcccacttgggactgggaagattttcagtgtgccagaaatgcaagaattagcggacaaataccaacgctcaattccacaaattgcactacggtggtcattacaacacggcttcttaccattacctaagtctgtgcatgctgaatacatccaacaaaatgcccaagttttcgacttcgaattagccgatgaagacatggctgcaattgatgcacttgacggcgtcgttggacacgcgcaagatcctgatactgcaacattctaaaactgtttaaaagccactaacacagtggcttttttcgatacagatcaacgtcaaaatgtgacaaagcgtattttagtttagatatttaacaatttagtttacctcttccctaaattatggtattttcattattattgaatccgataaaatcggactaaagcccgacgttatttaccgttttaagcttgagaatggtaaaatagaactagttagttaagaaatggggaattattttgtcaagtggtgagttattcactaatctatttgttatgttggtcaccttctttttagccgccttcttcgtggccgctgaatttgcgctcgtccaaacacggccaagtgccttagaagatgccatccattcaggaaatggtaatcctaaaaaattgaatcttgcgcttaaaatgacgcaaaacttaaacgaatatctctcaaccacccaagtgggggtcagtgttgccgggattattttagggtggattggtgaatcaaccgtcgaaaccattctagtcgatctgctcggtctcactcacctgatttcaaatggtggcttacacatcatcggcgcagttgccggcgtgttagtcttaacctatttagaagtggttttcacggaaatcgtgccgaagaatattagtattgatattccaatgcagatgttgatggctgttgctaagcccctccattactgtcatattatcttctatccatttgtttggttactcaacatttccgcaacgggtgttgtgaaattaatcggcttttcacctgctgaagaaggtagtgatgtgctttcccaagcggaaatcattagtctctctaaaaatgccgtcactggtggtgaattagatcgcaacgatttagtttacatgcaacgggcctttgactttaatgaccggattgccaaagatgtgatggttgatcgcacaagtctctacgtcgtcgatatcaccgataccgttaaagacgtcttaaaagactacttacaacaaggctttagccgcttcccagtggttgctgaaaatgataaagacaagattcttggttacgtctacgcatatgatttagtccgtcaggcacaagttgacgattcaatccgcgtcagcaaattactgcgttcgattatctccgttccagaagcaacccctattcacagtttgttgaatcaaatgatcaataagcaaaccccaattgtggtcgtcgttgacgagtacggtgggacgagtgggattgtcactgataaagatatctatgaagaactattcgggaccgtcaaggacgaaattgacgatgtttcagatgaatatatcatcaaagaagacgataaccgttaccgtgtcagtgggaaaacgacgctctatgatttcgaacgtttcttcaagactaaaattgatgccttcgaagcctcagatagcgtgaccctggccggttatgtcttagaaaacttcaccgacttacaacaaagtgcggtcattcatatcaatcaattcacattaaaagtggtcgaattcaatcgcggttacatcgactggtttgaagtctccagcgaaccacaaaataatacagccaacaatacaattattgaaaccaattaaaaaaagagtttgctatcagccatctcctgaggattaacaacaaggagatggctgatagcacatgtttaaacaaaaacagccttgcgcaaatgcgcaaggctgttttttaatttcgttatgctaaataatcacgactccagatgagccccattactttttcgccggtgtgcacgccgaccacaggaccaatgtgactcgtttcaatcggcatccctgggaatgtttccgtcaacgttgcgacccactgcgcactttcttctggattattaccgtcaatcacgctaacgcgtacgggatagtcaacagattcgactgctgctttgaaatctgctaatactttttgaaaggcccgtttcttggtccgttccttcgttaaggcaacaatttggccggcatcgttaaaacttaaaatcggtttaatccgcaaaagattcccgacaaaggccgcactattcgaaatccggcccgttcgcaagaggtggcttaaatcatccacaacgaaataaacgcccatcgttgctcgtaaagctaccaatttcggcatgatagttgcggcatgttcaccttgggcaactaaccgcgccgcttccaaggccaagaacccttcaccggcactcgtaatcttggaatcaaaaggatacacttcgatgccttcaaccgactgtgcgtaggcggttaggttattgacaaagctcgtaatgccacttgaaagatggatacaaatcacttcatcgtagcccgcttttatcaattgatcaaaaacctgttgcatctgacccattgtaatttgcgaagtcgttggtaatttttcagtagtgcgcattttatcgtaaaatgcttcactcgtgatatcgatattttccaaataagtttgttgtccaaaaataacggtgattgggaccacagtaatattatggtcggcggcaacttgtggatctaaatacgccgcactatcagtcacaattgctgttttcatgtcaggctcctcaataaaactgtttttgtcattatcccaccaatgtggataaagtacaaatgaacaacaaaaaacgccggaccactttctgcccgacgccacagttattaatgagtcattgattcattctcaaatacgacaatggagatgtgcccatcaattaagccactgttattactcaaggttaacatttgattcttttcgttaacgtctaatacttcatgttcatcaaagtagccagctgcataatctttgtagtaaacagcccctagatttgattcaaattcatctggataatctttaatgtcagcatccgctggtactaatagcaatctaaagttcgtatccaacgagcaataaccaacgtttgaaaatggaccaacaccatcatctaagtccaataaaattttttgacccggtgtcatcttatccttgattttcgcaactgctgcaggtgttatttttaatgccatatcaatcatccctttcatgcttccagtctaccgccgttttaaatttgacacaatctatctgctcagccagtgtgctacaataggcttaaccgtttatttaaggaggtcattatgcttttttatcggtattcatactttagcaatcagaatgatttcgaattctatctcaaactaagtctgtcagtgatcatcgccagtttaatcatcatcttcttcgttcaatatctccgccaccgttcagattcgaagtaccgtgacttactaatcatcttcggcttagttgggattttactcgccggcattcaatatacacggattcaacagcttaacaccgcccactcgcaacaagctcagatggcgcaattcattagaagtgtggcgactgcgcagaaagctagccttaaaaccgtcgcagtcaacacgacttcgcttcagcaaaacatggtagtgcgcgtcggtcatcaaaactaccaagtcatatttgataacaattttactagttatcaactccaaaaagctcagttgattagccaagacatcacctatcaagattaaggagtttactatgccatcttatttcgatattaccattaaattaattttcggtttcttctgtttagtgttacaaatcaacctctctggcaaggggaatttagcccctagcagtgggattgatcaactccaaaattacgttcttggggggattgttggcggtatgatttataatgccgatatctcgctcttacaattcttactcgttttactcatctggaccttaatcgtcttcacaatgaagtttctaaccactcacaatcgctggattaaacgctgggtaattggtaatccacaaacaattatcaccaacggccacattgatattcaaacggcctctaagaatagtttatccgcacaggatctgtcgtttaaactccgaattgccgggattagcgatattcgcacggtcagtcgcgcaatcttggaacaaaacggacaattaaccattacgcaaaaaggcgacgccacgattaaatatccgctgattatggacggccagattaattcagaagcacttgaattaatcgatcaaactgaagaatggctcctcgccgacattcaacagcaaggctacagtcttcaacaaatctacatggctaactacttgaaccatgaaatcgtgattacgccctattaaaaaagatgacccgcaaaggtcatcttttttaatgtcgtactctttggagaagcgttgcaaccaaccagacaatcgccccgccaattaaaacaatcgtgcttgtcttcaaaccataatccagaacagccaacccatagtcggtaattgtttgattaaaatcgcccgctttttgagcaatttgttcaacaatgccactatatttaaacgcagccgcccctagtgccaagaataagccactccaagcaaaacttgcaccaacactccctaatacataccggaattgaccacttagtccccattgaactagtacaagaacaattcccataataattgcaacccaggttaagatattgatcacatttctaacaaacaacatcttagtcgctaatggtgctaagtaaggtgcttcaatttggttcgtgaggtattcttgtagtggtggttgaaccgcaaccactgccgttttaattaaagattccgtcaacgcattttcaggcacaactgcttctaaatgggctgcaagttgtcccatcatttgtgctgtgggtaacggcttttcttgtcctatataaatattatgaacagttttctttaaatcggcccgcacatcagattgggtcagtaatttgacttgtacttcagttggtagcccatttttttgtgccgcatctaataaaacaacgttaattttatcagtcatcgcagctaacgtcttcggttcactgagctgttcttgcgtaaatgattctctcaaaactgtcaggctgagaatcatgccaccaatgccaaggaaaacgcaaagaaagattaagaacgtcaaaaagcgacttaaacctcgatgtggtcgcacgcttggttgattttgattcaaacgactaattggttccattgattaaacaccctttctattcacgaaccctattaaacttcaagactaggattcttaatcattaaatgctaaagtgaacttatcagtcacaggaggccattcaatgttaaaaaatttaacgattctctatatttcaattgctggtaatacacgttcatttgtaacggatttacaggattatgcggcgcaacaacatgctaataacccagcgttaccaaccattaccctcacagaaatttcggatgcgaccccctttaaagcggagaccgaaccgttttacgcgttcgttccaacttacttagatggtggcaacggcattgataatggcgttaaagaattaatgaccaatagcttaggcgaatacatcgattatgcgcagaacgcacgcctttgttatggagtaatcggtagcgggaaccgcaacttcaacgaacaatattgcttaactgctaaacggtatgcggtacaattcgatgcaccgtttatcgccgattatgagctccgtggcaatgcgaaagatgtcgcgcggatttataccttaatggtcgctaacgcgcaacagcatgcctaaaatttaagattagccggtaatgatgtgattaactcggtgggttgttggacaatttggacagcacccgcctttttgagttccgcgattgtgccaaacccataactaacaccaactgcattcatcgcgttttgcttagcgcccaagatatcattttggcgatcacccaccatcagtaatggtgcggtttgtggcgctagaccaagttctgataatgcgtaagtaatgacatccgcttttttgacccgcgttgtctcatcaacacttgctccaaaaacaccgctaaagtaatcacttaactctaaatgatcaatgaccttcttagcgaatggttctggtttcgaagtcgcaattgccagttgtaaatcctgtgcttgcaatgccgctagggtttctcgcatgccaggataaagttgattttcatacaaccctttaggcgcataataggcttgaaagactttaatagcttcttgagtagcagctgcatttaaaccaaactcacgcataattgtttcattgaggggtggcccaatgaatgtgaccagttcagctttggtttgcgtcggcaatgataactcctcaatcatatattccaaggcgttcacgatgccttcttgcgaatcggctatcgttccatccaaatcaaataaaacggtcccctttgtcatatcaatcatctctcgatctcttataaagtaccttcattttagcatactctttgacccttaaactttccttattgcttttttcataaatctataaacctctggtcacaaaatcttcacaaattcccattatagtattgagtatagaaaagcgaatcttttctatttcatactacttaactttttcattttactcctccaaagtaaaattaaggtagacgcaatctaccacgcacgtattattcccccaaagtaatacgtgtaccccttactcctttttagatcttcggatctgctagaaaccagtctccccaaggctggtttttttgtgtccccatcaaaaaagccgccagatatgctgacaaatttgtccaaaaattcggattaaatttgcaatctaccttacaatcgttggatcgattttcttagttttagccaacttgcctgttaagagttgggccgattggatggtttcaactggtttgaccccatattggaacgttgcctataacgcatcgtttgcaattatggcgttaatcgccgttgcggggattgcttattcttgggttcaggatgaaggttttgatccgttcccagcctcattacttgctattgtttgtttcttattagtgacgcgcccaagcactgccattgtttcggcatccggtaagattgttgtctctgttaaaatgatgagtcaacaaaccgggtttattgatcggacttggcttggtggacaagggatgattactgccattattgtcggtttattagtcggttggatttactcagctttcttaaaacatgatattcggattaaattaccagaacaagtgcctgcgaacgttgcaggttcctttaccgctttgattccagctgctgttttaattagtggctcactcttggtttatatcttcttcgacaaggttgcaaactcaaccttaacagaatcaatttacaataccattcaagcaccacttcaaggaattaccgattcatttggtggcatgttagccatttctttcttagtaccattcttgtggttcttcggggtgcatggttcaacaattgttggtgggattatggggcctttattgcaagccaactcactggctaaccaaaaaatcttggattcaggcaaagcattaacgttagctaacggtggtcacattgtgacgcaacaattacttgatcaatttatgacagtgaccggtgctgggatgacaattgggattgttgtttacatggcattctttgccaaatcagcacaattcaaagatttagggaaattatcattagcaccagcagtctttaatatcaatgaaccgattttgttcgccacaccaatcgtgatgaacccgattatgatggtgccattcttcgtgacaccaatgctatcagcaatcttaacgtggactgcgattcgggtcggtttaatcccaatgttccccggaacgttggtaccatggacgacaccaccaatcatttctggtttattagtcggtgggtggaagaccgcattgtggcaagccttaatgttactcatgacgttctttacgtacttaccatttattcggaaacaagatcatttaaactatgcttcagaacaaggtgcaacaactaaatagggggaaaggtcaacatgggacaacttagaaaagattttttatggggcggcgcagtggctgctcatcaattggaaggcgcttggcaagcggatggcaaagggattagtgttgccgatgtgatgactgccggggatgttaatcatcaacgggggattacagatggtgtacaaccggggcacaattatccgaaccacgaaggcattgatttctatcatcgttatccagaagatattaagttatttgccgaaatggggttcaagagctttagaacatccattgcatggacgcggatttttccgaatggggatgaagcacaacccaacgaagccggccttaaattctatgatgacctatttgacgaatgtctcaaatatcatattcaaccagttgtaacgctctcgcattttgaaatgccatatcacttggtcacggaatacggtggttggcgtaatcgcaaagtcatcgactttttcttgaactttgctgaaacggtcttcaaacggtatcgtaataaagtgaagtactggatgacgttcaatgaaattaataatcaagccaattaccacagccagtttgccttatttacaaattctgggttacagattcaacctggtgaagatgctgaaaaagtgatgtatcaagccgcccactacgaattagtcgcgagtgcaaaagctgtacaaattggcaagcaaatcaatcctgatttcgaaatcggctgcatgattgcgatgtgtcccatctatccactgacagctaaaccagaggatgtgctcaaggcagaacgcgcaatgcaaacccgttattggtttgctgacgtacactgtcatgggcgctatccagaatggctcttacaatatcaaaagaaccaacactacgatttggacattaccgcagatgatttgaaagaattggctgcagggacagttgattacatcggcttcagttactacatgtcatttgcaaccaaggacaaaggtgaaacaacgcttcattatgatgaagaatacgatttagtacctaatccatatgtcaaggcatcggaatggggctggcaagttgatccagttggcctacgttatgtaatgaattggttcaatgatcactatcacttaccagaatttatcgtggaaaatgggtttggtgctgttgatcacgttgaagcagacggccaaattcacgatccttatcggattgattatttacgcgaccacattgttcagatgaaaaaagccgtggaagatgacggtgttgatttgatgggctatactccatggggctgtattgatttagtttcagcaggcaccggacaaatgtcgaagcggtatgggtttatctatgttgataaaaatgacgacggaacggggacgttagctcgttctaagaaggactctttctattggttccaaaaggtaatcgccaccaatggggatgacctagcataatcatgaatagcgacgcaggcaaattgattttgtctgcgcctttttttgttgaaagaagcccatgcattattaataacccatttttctgaaataaaactgttattttatcgtgagttaacactaggcaattaccattatgaaataaattatgagaattagggcttatctaatgcaaaaataatcactatcgtttacaataagtaagtattaaaaatggaatggggtaaagaaatgacaattacatatgtcgtcatcaacatcgtgatcatgcttatcatgttatttgttttaaacaagatggcccggattcacgttaagtttagtcgccgcgttttcacggcattgggggtcgggattttattcggtgcactcttacagattatcttcaaagcagattcaacggttgtcaaacaaacagctgattggatcggcattgtcggcaacggttatgtctcgttcttaaagatgatcgttatgccgttagtcatggtttcgattattcaagccattacgaacttggaatcatctaagggcttagggaagatggccggcatggtcattggaatcttaatctttacaaccttaatcgcagccacagttggttcagtgacagcggatgttttcggcttaaatgcgagtgatattcaatcaggccaagtcgaaaaggcccgctcgaaagaattacaaacgaagctaggcgatgtacaggaacaaactgttcctgaaaaaatcgttagcttcattcctgaaaatccattcatggatatgacgggttcacgacctacatcaacattagctgttgtgattttctcagctttcttaggggtggcagcattacaattacggcgtaaaaagccggaacaagcagaaatgtttaataaaatcgttaacgccttgtacgcggttatcatgcgcatggtaaccttaattttacggatgacaccttatggggtgttagccttaatgacaacgaccgtagcacaaactaatgttaaaggaattctcagtctaggcgagttcgtgattgcctcttacgtggcattaatcatcatgttcttgattcacttcctattaattgcgttcacggggttaaatccaatcaactacattaaaaaagtgattccaacgttaatctttgcgttcacgtcacggacgagtgcgggttcaattccaatgaacattgaaacccaaacgaaacgtttaggggttgaagatgggattgctaatttatcggcttcatttggggcttcaatcggtcaaaacggctgtgcgggtgtttatccagcaatgttagctgtgatgattgcaccaactgttgggattaatccttggagcatcggtttcttggttaaattaatcttgattgttgcaatcagttcctttggggttgctggtgtcggtggtggcgcaacatttgccgctttaatcgtactttcttcaatgaacttaccagtcgggttagccggactattaatctcagttgaaccattaatcgatatgggtcggacagccttgaacgttgatggctcaatgactgctggggtcttaacggctcacttattaggtaaattggataagaacaagtttaatgatatgagtttgacggaagattcagacgaaatggcttaatttcaaaaaatggagggtttagtgatgcgaacgattattatcggtgccacagctgccggaacaagtgcagctgcgaaagcaaaaagaacgaatccagatttagacattacgttatacgaaaaacgggactatgtgtcctttggggcttgtggcttgccttattttgttggcgagcactttgaagatcccaaccaaatgattgcccggacacctgaaaaatttgctcaacaaggtattgatattgcgcttgaacacgaagtactatcagttgactttgatgcgcaaacaatcgtggttcgggatttgaaaaccaatcaagatcgcacagaatcttatgatcaattaatgttagcaacgggagccacagctgtgatgccaccgattaaaaatgttgatctcaaaaacgtctatcatctacggacgatggcagatggacaagccttacgtgaattaggacaagatccaaaggttcaatctgtaacggtgattggtgcgggctttatcgggttagaaattgccgaagagttccatcaattagggaagcaagtccgggtcattcaactagaagaccgaattttaccactggcttttgatccagaactaacggacatgttcgcggatgacttacgtgataacggcattgaattacacttatcagaagctgttcaagccttagaaggaactgttcaggtgactggcattgtgactgataaggggcagtatgcgacagacttagtgattgtagcagctgggattcggcctaatacgcaattcatcacggatgatcgattgaagaagttgccaaatggtgcgattattgtcgatcaagcagggcggacatcgattgaaaatgtctatgccgctggcgataatgcaacggtcattaacagcgtgacgaaccaaccgatgtattcagcacttgccactggtgccaataaattaggccgaattgtcggcacgaatttaggcgggcaagccgctcaattaccagggatgttgaattcagccggtgtgaaattaatcacgctagaagcgggccgaacaggtttgactgaaaaagaagcggcagaggctggtattgatttcagtactgttttaatccacgacaagaaccaaacgaattattatccaggccaatcagatttaacgattaaattgatttacaccaaagcagagcatatcttaattggtggccaggtggttggtcaaaaagacgcagtgttacgcgttgatgtactcgcaactgcgatccaagcgaagatgacaactgaacaactcgggttactcgaccttgtttatgcaccaccgtttgcaagaacgtgggatgcactgaatgtggccggcaatgttgcccattaattaaaaaaaaagtgacaccgcacaaaccgtgtagtggcgctttttttgttgcatgcttaaacagttgttcatagtgtttacttgaatgtttactcgggtctgtgctaaaattgcacttagaaattaaatttttgcaaagttagttatgaattaattacgatgattaagaaaacacaaataaaaaatttatcgacaggagacagtttaatgaacaacacaaagagtttgattgcattgagttctggaattttaggggcagctgggatcggtttattgagtgcagggcaagtacaagcagcaacgacagcaaccgtcaactacgcagatggtgcaacaactgtttggacaagtccaacaactggtcaaactgctaaacgatacatctttaagggccaatcagtaaatcttttagcatcacaaaagattggcgctgaaacatggtaccgaattggaaacggcgaatgggtacctgaacgttacttaacaaccagtgacgctacaccagctgaaacaacaccagcaacagaagcacctgctgctcaaaagacagctcggattgcctatgccggtggcgcaacaactgtttggtcaacagcaacttatacagccccaacaggccaatacttaggttatggtcaaaccgtcaacgttgtgaaaacagaaactgtttctggcgaagaatggtatcaacttgaaaatggtagctgggtaccagctcgctttacaggtgatggtaagattgaagccacaccaacgcccgttgcacaaccggtagcaccagcacaacctgcaacagcgactcctgtcgaaacaccagctgcgccagcaccagttgcaacaacaccagcgcaaacagaaagcacgcctacaacaccagcacctgtcgcagaaagtgaatcaacaccagttgaaacgcctgccacactagaaagtacaccagctgtagcagaaagtagtgcgcctgctcaagcagaaagtacaactcaaacacaacaaccagctactcaagaatcatcagctcctgtccaagaaactgcaccagttgcaacaacaccagccccaactcaaaaggcaccagttgaaacaacaccagccccaactcaaaaggcaccagttgtaacgacaccaacaccagccccaacggcacctgcagcaacgactggtaatgcgcaagctgttattaatttagcgatggctcaaattggtaaaccttacgtttggggtgcccatggtccaagtagttttgactgttctggattaatggactatgtcttcagaaatgctgctggtaagagtatcggtggttggacagtccctcaagaaagtgccggttatgctgtttcattaagcaacttgcaacctggcgatttattattctggggttcacaaggtagctcacaccacgttgcgctatacattggtggcggaaaatatattcatgccccacaacctggcgaaaacgttaagatcggttcaatgcaatactatgcaccaagttttgcacgccgtgtcttttaatgattgcaattaagcgaacatctcacctaggtgggatgttttttgtattttagccctaaataagctatgatatgtagagatttaaaaaaggactgacgagatgaagatagaagtacaagcatttatcaatcaaattcaagatcaaacatatttaacggatgaatacgagctccccacgccagatccttttgtggcggacggtattttggcacagttaaaactcgctattgataaagccattgaaaaacaagctttggcctctttttcggtgctgacagaatatgctggcgaacccgttaaggtgacattggaaacggggattgtgaatctaccattacaatacattaaaaaagtaaatcaattttttgaactcgacgaccaagcagaggtgaatctttatttatatgtgacatcgccactcattaatcgctcgaacatgcggattgacttaattgggacggtagcttcgtttgaagaatcggcagctgctaattggacgaagattgccgacttgctaacaaaggacttggaagccgtcgtaatcggttcacaggcgcctaaagaagaaccagtcgaaaagaaggcgcccgctaagaagaaagccgcacctaagaaaatggcaacgactaagaaaaaagcgcctgccaagaagacaacagctaaaaagacagctacccaaaaaacaacgactaagaaaacaaccaccaaaaaaaagactacgaaaaaagcagactaatttagtctgcttttttgatggcgtctattaaaggcaagtcgccgttaacaaacgagaatttcttgtggattgtttcggtcggatgttctaagacggtgcaaatcatcgcagcgacatcagcacgtgcaacttgcccaccagatggttgcattgtcactaggccggtagcttcgtcgtttgtaagtgtcccaggacgcaagatggtccaatctaaaccagagaattcaagccagtgatcggcatagtattttgcagcgtagtacggtttaatactttcaggccatttagttcgatcctcaacaaagagtgcactgaccatgacgtagcgactaacttcagcaatcttagctgctgccatactcttaacggcgccatcgagatcaaccaacagtgtttgatcatcgcctgttttaccgccagaaccagctgtaaagacaatcgcatcatgatcggcaaatagtggtgctaaagccttaggttgtttggttaaatcgaataagacaggcgtggcccctagttgtgcaagttcatccgcctgttgttcgacacgaatgccggctgtaacggtgcaaccggcagcaacgagttggctaattaggagctggccaacgttaccatgggcgccaataacaaaaatccgcatagtaaaacctccaatataaatgtgtgtgctgtccattatagtagttattgaacagtgacgcaaagatagtggatttaaaaacctgtgttgtagtacaataaaattcggcaccttgcgaaaaaatgagtgtgctttagggtatataatcttgaaagtggctgatggcaacctttaaataggcaaagctaattgtgggattcgttttagaaataaatctaagaatcctctcattttttcacaaagttgcttattagaatatcatgaagccgtgtttgttttgtgttatggtacagatatagagattgtgatttattggataagtagtcctatttgttaatgctatctcagaaagtaggaggagaacatgacaaatcaatatcggagcgtttttgatatcattggaccgattatgattggtccttcaagttcacatactgctggcgcagttgccattggacatgttgctaatcgtctttttcatgcaccgattaacaaagttattgtgcgttactacgaatcttttgcacaaacccaccaagggcatggtaccgattatgcaattattagtggcgtgctaggattcgatccggctgatcaaagggtaccaatggcagttgatttagcgcgacgtcaaggtattgacgttgtcttcattgaagatccagggaatagtccggtgcaccatcccaatacagcggaattaacgttaatcaatcgtgagaaggaactaacgatttggggctgttcaattgggggcgggaccatcgaaatccgccaagtcaatttgaatggcattgtgattaaaacggatggcccgttaccattggtttttgtcgaatcggaacaagaaatcggcgatgctttagaccagatatttgaaggtaactatcgtgataagcgcatatcggttaaagtgccagatcggtttttgtataaaatcgaactgattgataagccgtacccggaacagattgaacaggtccgcggaatgagccaagacgttattgtgttatagaaagtggtgggaagatgtatacaacaattcacgaattagttgaaacagcgcaagaacggcaactaccaatctcggaattgattatcgaacaagaggttgcgatgagtcacactagtcgtgaggtcatttgggcaaccatggggaaaaacttggatgtcatgattgcggccgaagaaaaaggcgtgaccggtgaaggtgttcagtctgccactgggattacaggcggtgaagcggttctgttgaagcggtatcgggaaaagggaaagtcgttatcaggtgatgtgatgttgaccgctatgcaaaatgcagtggctaccaatgaagtcaatgcttcaatggggatcatttgtgcaacgccaactgctggttcagcaggtactttacccggtgttttatctgttattactgagcgcttggcgcttgatcgggatgcgcagattcggttcttgttttgtgcgtcagcctttgggatgattgttgccaataaggcgatgattgccggggcaactggaggctgccaagccgaagtggggagtgctgccgcgatgggcgccgccgctgcagttgaagctgctggtggcacaccacaacaatcgtcggaagcattcgcgatggcgatgtctaatctattgggattggtttgtgatcccgttgctggattagttgagataccatgtgttaaacgaaacgtgattggggccgtcgatgccttgaccagtgctgatatggcattggcagggctaatcagcaagattccagctgatgaagtgattggtgccatgaaacgaatcggtgaagatatgccatctacattacgtgaaactggtttaggtggattagctgctacaccaaccggggttgcattgaagatgcaaatctttggtaaggataagagccttaaataaaagcgacttttaggaggagcaatcatgcaaaagaaactttcaaaatccgcatacggcggtgtttcaggtgagaaatatgtaccgtatgtcaatcaaggcgacaaaaaggtcggcaacttagcgattctaataatggggagcattttagccattatttttgctgcttcaacagcttattctgggatgaaggccggtttaaccgttgcagccgggattccaggttcaattattgggtctgggttagtcggcgcctttgccaaatcaaaagggattttaggcaagaatattatgcaagggatgtccagtggtggtgaatcaatcgccagtgggatgatttatgttttaccagctattattttaattggtggccacatcaacttcattcaagggatcatcgttggggtgctcgcaattcttttttcaatggggacagcctcattagtgcacaactacttaatggttgaagaacatggtaagttggtttatccagaagccatggcgatttcagaaaccttagttgcgtcagatactggtggcgattcgcttaaatacatgggcgttggctttggtatcggtggggttattacgatgctaacttcatcagtgtttggtgtcgtcaacaacatgattagctacgttggttcatcattttataaatggaaattggacgttgaagtgaatccattacttgcaggaattggttttatcgttggattagaagtgtcattaacaatgtttgcgggtgcgattttatccaactttgcgattgcaccgttaatcggttatttcacagatatggcgggcaacagtgcgcatgtttggaataacacgagtttagccgtgaatcaaatggccgttaacgatttatcaagttcatacgttaaatacattggtgccggaatgatgctttgtggtggtttaatcggtgcgattaaattaatcccaactatcgtgacatcaatcaagaaaacactagctgctaaaaacgtagcaggcgaagaaaagaatacacttggtatgattgccattgttgttggtggtgttgggatcttcgttattggtattatcattgcgcaaaacttcttaatggggattgttggtgcattactagcagccatcttaagtttactctttgtcattgtttcagcccgggttgctgggacgattggttgttctaacttgcctgtatcagggatgacaattgcgtcattagtgattatgacggtagtcttcgtattatttggttggacggacaataaccatacgcaaatcttattgatgttcgggacattcgttgtgaccgccgttgctgttggtggtggctacatgcaatctcaaaaagtaacatatgtcattggtggttcaaaatctgaaatgatgaaatatttcatgattgccgggattgtcggcgtaatcgtaactgtcggcacaatcagcatcttatcaccacaattcgttacagatagtgcaacaccagcctttgggttaccacaagcgaacttaattgctacattaacatctgggattatgacgggtaaattaccatggatcatgattatcgttggggttatgatggcattagctttctactttttagatttaccaatcatgaccgttgcaattggtttttacttaccaatttcaaccacttcaatcatcttgatcggtgctttgattaaagtctttattgaaaaagcaacgcgtgatgaagcgattaagaataatcgggttcaaagtgggattagtttatcatccggtttaattgctggtggttcaattattggtttaatcgggattattctccacgtaaccggtgtgttaaaagatcgcgtgattactggttttgcgaataccaatgcaatggggattatcttattggttgtcatggttgtttcgattactgtgccacttatgatgattcataaaggaggggcaacagaagatgggacgacagaaagcggagattgatttagaacaactcatctatgaaaaaaatccgcaagttcagtttaagttacaagctggccaggtcaccattattcggccgcagaatcactggattcaacggacattacggcgtttgcatgtgaagattccgctagaaacacagctggaacttgatgattatggtagttttgtctttaggcatgtgaatggaaaacgcagtgtccaccagattggccaagcactggcaggacagtatgatgaagccggtgaatacctgtatgaacgattactcgtgtatttgaatcatctagaacacacagaacatttgatccggcgggtaaccgactaagttttattaatcaattagtgaatcacatttttaataaaaaggagtttttcaaatgacagacagaatcgaattatcagcatgtacttcaatgatggtagggaagaatgcgtcaattgatggctctacgatgatttcgcgaaatgaggatcgcttctatgcaatccatcctaaacggttcttcgtacaaccagcagttcatgatcgacatgagacatatgtttcaaaatataacggcttaaccatgccgttaccgacggacggttatcgttacacatcaacccccaacggcgatttaagtgatggtttaaatgaagaagacgggattaatgaaaaaaatgtcgccctctccgcaactgaaagtgtttatgccaacgaacgggtattagcttatgatccgttggtcaagcaaggtttagctgaagattcaatgtgtacgttggttctgccatacatcgattctgcacgtcaaggggttcaattgatgggggatttgattgctaaatacggttcagctgaaggcaatggcgttcaatacagtgatcaaaatgaagtttggtatcaagaaattgttactgggcatcactgggttgctgttcggattccggatgattgttatgcagttgccgctaaccaaattgccatcgaagatgtcgactttaatgatccagaaaattacatgtggtcagaaggtattcaagaattcgtcagtgaaaatcacttgaatccgagtgaagctgaatggaacttccgtaagatttttgggacggatactgaattagatcgtcactataacacaccacgggtttggtatgcacaacgctatttgaaccctgaaatcaaacaagaacctgaatcgagtgacttgcctttcattcgcaaggctaaccgtaaaataagtgtggaggatgttcaatatgtgttaaaatcacattataacgaaactatttacgatccacttggtaatgggacagaagaacaaaagacgatttatcggtcaatttcactttcacggacgcaaaactcacatatctgtcagattagaaacaatgtgccagatgctgtgcgtggtgttcaatggttaggtttgggggtaccaacattctgtccacacgtaccattctttacgaatgcgatggatacggatgaaagttatcgcgaactaccagcgaagatgcagttgaagaacgcttactggttatatgaagcattagcaatgattgttgaatcacactacggggcctttaagaaagctgatattgactaccaaaaagcattatcagaatgggcaagaactaagattgctacggtggatgctgctgtaaaggcggaagcgaatgccactgatttcttaacccagcaaaatcatgaaattgctgcacattaccatgaagcaacaaccgatttgttagcgcaattggtgacagaaggaacgcaactttctaagttgaccttcgtcatggataagaacctatagccaagtgcgcactttaatcatttgtcacactcttccaaggggggagtgtggcttttttaatcgatggaggtgctacagtgattgctttaaaaggaaattcgaaaaaaattattatcgcgatggtatacggttttttggcggcggtgagtgttaatctgttcttgattccggcgaagacgtattcgagtggggtcacggggattgcccaattactaacctcgttagtcagctatatgggcggctcattaagtgttgcgatgttggtctttattttgaatgtgccattattgattctggcatggttcaagattaatcatcagtacgcgatttttagtatcgtcgctgtttttacgagtgtccttttcttgaaggtcattccagtacctgttcacccaattgtcaccgaacgatttgcaggtgccttgttcgggggtgcattgattggtttaggggttggcttgtgttttaaagcgggtttttcaactggtggcacggacgtcattgtgacgttagttgggcgcttaactggcaaacgggttggtgttgtgaataatatcatcaacggaatgatcattcttgcagcgggcatcttctttggttggggtgctgccttatacagtatcgtcgaaatctttgtttcaagcttgttgatggattatatctatattcaacaacaaaaggtgactgtgacgatttttaccaagcgacctgaagaattgaagaagcgaatgcgtgactttattcatggtgcgactgaattagatggaactggtctgtataccaaccaagaaacaacagtgatcatgacagttgtttcaaaatacgatctaacggaattaaaacgggtcgttaaggatgccgatccgaatgcctttgttaatattcaatccacaatgaacttgtggggtaaatttgaaaacgtcgaataatagtagctatcctctggaactaaaaaacggtcctttcaacaacgctaagttgtgaaaggaccgttttttttatgtggtttggcggagttgaccgtcttcgatacgccaaacgtgatcgacgagatctaaaacccgttcgtcatgtgttaccatgacagctgcgcgtttttgttcatgaactgcatcgcgaattaagtggacaatttcacgaccacgttgcgcatctaaactggcggttggttcgtctgctaaaatgagtgcaggttgattgataagtgcccgagcaatggcaacccgctgcttttcaccaccagaaagcatagcgggataactatgtaatcgatggcctaatccaagttgtgtcagtaattgttcagcggcggattgatcgcgacgacgggcgattttttgtaaaaaagtcagctgctgagtgaccgttagatagggaattaattctgaactctgaaaaataaaaccaattgattcgcggcggatttgtgtttgacgattacgattgagtgttgcaagttcttgaccggccaaggtaacacgaccggctgtgggttgcaagagcgcgcccataatcgtcaacaaagtacttttaccaacaccgctgggaccaacgatggcgctaaattcacctggctgaatcgtgaaggagatatcttttaaaatgtgattaatttgatcaccatcgggataatctttggtgatgtgttcgagtgttaaaatcggtgctgacatattaatgacctccaatagctgtgatcgggtcaatccgaatcacttgaataagggataatagggcgcttaggatggcgacggctaaaaatagaacgctggtgccgatgatcgttggtgctgtgagcataaacggcatgctggcaggcattgactgggcgatgacactaatgataccgccagccaaaagaatcgccactgccgttaacaagccaatctcagagatgatgtgctggctgagatagcgtgtggttgtgcccaatgcttttaaggccccaaagtcccgtaatttctgtagggtaatgatataaaagaaaattgcgaggacaaacagtgagatgacgtataaaaagccgatcatcaagtacaatgaactttgttctgcagagtagccagggatgttatcaatcaaggtttgtttgctgatcacttggtagtgcttgttaaccgacaagggccgtttgctagcaaacgcgttataggtcgtcttttgcgttggaaaaatggtttgccactggtggtggtttaaataaataacaggcgtatgggcataagccatctgcttgctaaagccgccgattttaaattgctgaccagtggtactgtctttaaaggtgtcgcctaattggtaaccattggcttgtaacttgctgctgaccaccactttttgggtggcttggttggacagcttttgaccttgggtgactttgggtgtcatgaagctcgtagcgtcaactgcaatgtaggcaatgtcagtttttgtttgttttttaggccgctcgatggtggcttgggtgacgttgatgggtgtcagtgattggtgtttgagagcttgccaatcagattgggtgagtgccgagcgactcaaccgactttccgaaccggcttgtaaaacaaaatgcgtcgccggcgtatttttaatagccgcgccactatcgtttgctaaaccggcagctagtccggtgatgaagagtactaggaaaacgattaaaaagatgataaaactcagtgcgccaaattttaacttattatggcgtaattcttggattgttagaaacatatgccgacctccgatgacttgttattaaggctactataacgatggttagttgattcaacaataatcaatctaagtgtttctgtgttataatgcacacaagttagtcaattgtgatgtaaatggaggctgaaagatggttaatctgcaagacagacgggttaaacggacacataagttaattcgcacaagttttattgagctcctgctaaaacacccaattaatgagattacaattcagatgattgccgaccgggctgatattaatcggcggacgttttatttgcattatacggatatctacgatcttttaagccagacagaagattttaccttaaatgagttcagccagttgctagaacgttttgagttgccttctgaaccacagattgttggccaaactttctttagatgggtcttgtcatatgtgcaagacaacgagtctatgttacgggtattgtgtcgtaatcccgattcacagttaatgaataaattagttgcgttgaccgtgactcacggcaagcgggtgattccatttcagcagccggaaaacgctgattatattttgaattattgttgttggggtctaatcggtgttttgcacactgcattgtttaaaccagcgtttgacgcccagcaattggcgctcgttgctgaacagttattgaatgcttctttacaagtcagcgaaattaaagcatagaaaaaagcccaccggtaaataaatgtcggtgggcttttttctattttattttgctttagcagcttttaattgcttgaggttaacaacgatcttgttgtttaattccgaaacgttggccttgtcggctgcatcgaaatccgtaatgctaattaaagcggagttttcatatactttttcaacagttcctgtaaatgcaccatctaggtcttcgttcactttgccggttactaaatcaccgatattgagattttctttatccatagccaaaaactccttcagacattattaaaattaccaaataaggtgataataaactatgtcatggtaaatagcaagacttactgctataaattaatcgtttgattgtgaatgaaacgaaattggctatttaattccccatctaaatacgctaaaacgaagaagtgttaccggttacaaatcaaaattgaggggaattcatatggaaccttacttagttttttcagatattgatggaacgttggtccttgaccatcaaatcgtgacacctttgaccaaacgcgtgattcgaacattacaaaaacgcgatgtgattttctatattgccaccggccgaatgtacaatcttggccgggtaatttcgcggcaaattaacgatgatgtccggattgtggcttctaacggtgctgtctttgaaaatggccatcagatgaacaagcattatttaggtaaaaaagcgctcaaagctgcttacgaagcatgtttagcagatcccaatttatctgcgcacttttttaccactgacacagcttactatacccaagaaatccccaagtttgttgcgcgcgatgcggggaatttattgttgaatgccgatattgataatcaaccggtgactgatttagaaatgttgttgaatttaagtgatcagattactaacgggattatcattggtcgcggtcatccagagagtttagcagccgctaaacaacgattaatggatcaagctgtgatgagcttgtcttcttctggtccagacaacatcgagatgattccaaccgggattgataaagccactgcaattcgccagattcaaatgattcatggaattgatgccgatcatacaattgtctttggggatgggcaaaatgatttgggaatgttgcaatcagcgaagtacagtgttgcgatggacaatgccttaccagaggtcaaagcggctgcaaattatgtaacagaaacgaatacgaatgacggggtcgctaaattcttacaacaacattttgaattagcactttctgatacagaagttggtctctaggggcttgacccgctttttatttttcgatatacttatatcacggttgttaatcaaccgtgaaatgctgttttagctcagtaggtagagcatcaccatggtaaggtgggggtcgtcggttcaaatccgataaacagcttaaaaaaagagtgtgactcgaactgggtaggctttgaggattaacagggaaaagggcattatggcgggacttgccataatgccctttttgcagttaaccggagaagactgttcgaggagcacgttaaaaaatgagtgcattcaagcttggtcaacttttgagcattaagtcgagaataaaaggcggacaacatttctaacatgttgtccgtcttttttaggcttttctggttaataaacgttcagttaattgttgtagcgttgtttttgcgggcatgtcgggtagtttcgcaagaccagcgagtgcgcggtttgtgtaatcttgtgcgagtgcttgggctttttcgacacttccagattgacggacgatgccttgaacagcgtgcacatcggcatcagtcatagctgcttgtttttccaagtagggtgctaatgtttggcgattggattgcagtgccatgattaacggaatcgagtagacgccgcgtcgcatgtcatcgagaactggtttgccaaaatcgacatcggtctgagtgtaatctaagatatcgtccagaatttggaaggcgagaccgatatttaagccgattttctcggcttggcgggcaaacttcaagcctttttggctttcgtaagcaccgatgaagcaactgagcgcgaacagttggccggttttaccgttaatttgttgtaggtactgttcgggggttaaatcgagattatatcgggttgtcatctgactgagttcaccgtcaagaatttgatccatcgtttggctgttaaattggatgctcttcaaatcgctcgcataattggctagtaacttgaagcagacaacgaataagtagtcgccagcgtaaacggcgacatctttgccgaaacgggcttgaatcgattcttgatggcgacgtaaattggaattatcaacgatgtcgtcatgaattaatgtcgcagtgtgtagcgtttcaacagcggcggctaatgcgatcatcttctgtcgatcgactgcattaaactgtgaaaataataagcagtaagcagggcggagcaacttgccgccagcactaatcatctttaaaatggcgtcggtgacggcttgatttttggtgtgaatgttgtcttcaatgagcgcaagactttgcgcaagttcggtttcgatttctggatagttctgccacatggcatgtactttcgccataattaactccttgttaaattaaatttcgtgttgggcttttaaaaaagtcagggttttgacatgttcgaataaaaaattcgcggctacgccgaccgcaattccggcgagaataccgagaaaagcaagcactggtagatagaggaggacttgccaactctgggcaatgaaactcgcgacgcagagttgaccgacattaaagagcagaccaccagcagctgagatgccaatcatactcataaagcggcggctaaattgcttgaggagtaccatgccaaagaaacttagcgttgccccagcaatgctatacataaaagtagagagggttccccctagcaaggcggataaaacagttcgcatcaccatcaataaaaagcagtcgctgaccggtagggtaaataacgaaatgatggtaattaaattggctagtcccaacttagcacccggggctacggcaaatggaaatggaatcgcgcgttcgacaaggccaataataatcccttgagcgcacaagagtgcaatatagatgtatttacgcgtttgatcgttagtcatcgctgtactccttttaaatcaggcagaaaccatcccgcccgtgtcggtcccatccttggctttaatttcaatcagtaacttgtgtggtaagcaaacaatggtttggcctggcttagaaattttgccacgcttaacatcaatctgattgaagcaattggcttcagtgacctcaatggcatgatcggttaccttaattttgttgtaatcaccgccggcatcgcgataagtgaagtggctaacaccatggtgggtggttaggttcactttgtagacggttttgccatcgtgtttgacgtaggccgtcaatacctgcgcgtttgaatccgctgcttgcgtcgtttgccattcgtgccaactaaaaacagcaactggggcaaacgatagaataaacaggccgatgactactattatatcaccagggcgaatcattttgatgtaacggttagcgcgaatttgtttaaacataggcgtcagtctttctctctaaaatagcaataaaaggggttatgacaaaagcctgtctgtcataaccccctccttttgatagctgtgaattgcttttataatgtgctttcaaaagcattctattgcgtttagcactattagccaaacaactagctacgctagttattcgtctaattttgctaatccgcatagaataaacgcttttgacgcactcagttttataacgtgctttgaagttaactttctgcgtttagcgctgtgaatcaaatcatcgactatgtcgctaattcgcttccctgtgctaatgcttaaagtcaaaccgtttcaaacgcactcattgatttttgtatagtgcacgttgttggccgtagcgccagtgaccgagatgtttttgtaaatatggaacaacccatttatctaatccgaaggcacggcctgaaccgttcatgcaggcgagggccattggaataatccaaatgttaacccaatagaacatccctgaaaggcagaatgtgataaccattgcaacggttactgcgctcgttaaccaagtgaagagaccagcaattaaagctaagccaattaaaatttcaatgatggtcattgttttttgcatgaagaaggcgacttcttggtttggaatcaagaccttcgtgatgctgtagaaccagtggggcatcttatcgaagacgggcattggatcatgaccgaataagtaagaaaggccgaatgtgactttagcagttgctggttcagcagccccgcctgcagcggcaccgctagcagcacttgttgcatccgccgctttagaagcaccgctggtgacagctggttgaagccagtcaaaaggtaaccggagcttattggtgaaccaagaaccttcaccttgaaccttgtcccaacaatcaacaagccacattgcgcctaagaaaattcgcgcaggaactgtccataaaacattaccataccgtgaaatatgaccgcgcatcaagttgcgatcgttcttcgttctgaagaactcattcattgaatagtggaataaatcgtagccagaataaatctgaacaaaatagagcatgttgactaaatgtttaactaatgtggcaaagaacccactgagatggaagaaattcatcaagttggcaaccgcatagcgagaaccaattgaaaccatgaagccggaatagctccctttgtatgggacttttgctttaccttcttcagttgcgatgatgttctttagggctgttgcagcagatgcttcggcgccttgaacaatttggggttgaccgcggccgtcatcagtttcatcgaagaaagccacatcgccgacaacgtaaatcttgtcatcgtcaacagattgcatgaattcgtttgtcacgattcggccggctttaccggttgttaggccaaattgtgccgcttgtgaggaagctttgacaccagctgtccagattagagtggcagttgggaaagttgaaccatcatttaaatcaacatgcatttcgtgaacacctgtaacaccggtattcttgcgaacatcaattttttgtttagccatgtagcgttctgctttggctgcatcgttgcggtcgagcatgttcatgatggttggtgccatttccatcattgtaaattggatttcttcgggatcaatcttgttatcagctgctagttcatcacgccagtcgcgtaattcgccgatagtttcagttccggtaaagccagaaccaacaaccacgatattcaaaagggcccggcgtttttctgggtcgtgttcaattgccccacgacgaacaacatcgataatatgttgcttcaattcaacagcctgttcccatgaacctaaagtgaaaccatgttcggcaaccccaggtgtgccaaagtcgttaggttcactcccaatccccaacataacttgatcataggcgtagcgtccatgttcagtaatgacggttttgtttgcttgatcgatgcgggttaccgtatcggtcaccaacttaacgtttttgcggcgacagaagagatgttgcaaatcgtgttgaacgtggtcttctggcacgcggttagcagctacttcgtgtaattccgttaaatacgtaaagtaggaatgtttgtcgattaatgtaatttgataatctggattcttcttgtaatatttcgcaagttttttagtcgcatagatcccggcaaaaccggcaccgatgatgacgatgtttttttgagccatgatgagccacccctaaatgaaataaatgcgttttcaatcagtatccattatacagaataaactaaagattgtctatttattcacggataagattaatgggattgatgactattaaggaaaccgttttaaattgtgtaaaaccaaagttaatcgccgtaaaataagtgatttaaaagacttgaactttttacataaaaaagataaactgactttgtgtgaaggttgatacaaactatatgattatttatgaaaagggcgggaaaattatgaaattaagtaaagcattagctagtttatcagttgttgcaatgtcagcaatggtattagcagcttgtggtaatagtaataacgctaaagattcatcttcaaaagaggcaaaatctagttcagtcaaagaatcatcaagcaaaaaagcaaccgctaagaaacaagttgccggcggtgaattaaaagacggcacttacaacttagaagaaaagaactacgaaaataattatcgcgttaagatgtcaatgaccgttgccggcggcaaagtgacaaagacaacttacgattacgttgataaagatggcaagtcaaaacaagatgacaagacatacaacgaaaaaatgaagaaagtttcaaaaacaaatcctaaagaatatattcctaagttgaacaaagaatttacagataaaggtgcagatgtttcaagcatcgaagtcgtatcaggcgcaactcatagctcaaattcatttaagaattacgcacaacaattagtgcaagctgctcaagctggcaacactgaaacaatcgaaatcgacaatggtgctaagatgcaagatggcacatataagttagaagaaaagaattacagccatgactatcgaacagttttcacaatggtggttaaagacggtaaaatcactgaatctaaattcgataacatcaataaagatggcaagtcaaaagctgacgatgctgcatacaacaaacaaatgaagaagattgctaagactgatcctaaggaatacatcgctaagttgaattctgaattcgtcaaagcacaagaaccaggcaaagtagatgttgtttctggtgcaacagaatcatcacacagcttcgtcaactatgctgaacaattagtcaatgctgcacaaaaaggaaatacagcaacgattacagttgataacatcgtttacggtgaataaaacgggacttcggcagtcagctgccaatgaattaatgggtaactgtctgctagaaggtacgatgaagctaggacaagtcaatttgtcctagcttttttaatggaaggaagtccgagatgtcttttaaaacgtttttagaatttgtccggattgaggccaagacagcgagtgtcttgcctttaatcttagggattgtttattgttggtacgttaatggccagctgaatccagtgacgacagttgtttattttgtcgcccagttttcgattgcattatttgtgactggctttaataatgtgatggattactacaaagcagttgatctggattatcgggcacagacgaatatcattgggcgcaaacatttgtcgccaaccaaggcactgcatttaatgctctattttttattgttcagcatggcggctggaatttggttggtttggcaaacgaatattttattactattaatcggtggcgcctgtatttttgtggccgtcttttacacgttcgggccagttccgctgtcgcggatgccggttggtgaattgttgagtggtgtgacagaatcatttggtgcattttttatcatggtctatgtcaacgtaccaagcgacagcatcatggcgctccattttgattggccgacgtttacccttaaaggtcaattaccaacattgcttagtttatgcctaatcggtgtgattattgcaatccccacttcgaacattatgttggcggataatatctgtgatctagatcaagatcggcgcaatgaacgttatacactgccgcattatttaggaacaacctgggcgttgcggttgtataatacgttgatttggttctcactagtggccgttgttgtggcagtgattacgaaggtcttaccgattgaatcgttactattgttattattgattcctgtcattttacgcaataatcgccggtttaatacgcggcaactgaaggatgtcacctttattaccgcgattcaaaatgcgatggcgatcaatattagcttgattgtcagcttgttattagcgattgtccgcacgacctggtggggataatccaccacattgacagtttggtcaacacatgataaagtaaatgggataaacgtcaattagagaggggcttttcatatgggtgttaagaaagtcgccttagcctgtactgtctgtggctcacgtaactactatgttgctgagaacaagaatcggacagaacgtctagagttaaacaaattctgtaaacattgtgggcaatactcacaacacaaagaaacgcgctaattaggaggaaataagatgattaagttttttaagagtgttggtcaggaaatgaaaactgttagttggccagatgccaaacaaacacgtaaagatacatcaacagtcgtcatgacctccgttttattcgccattttctttggcgttgttgattttgcaatcttaaaagtactacaattatttatcttttagaactggcttaattaagccggatttgctatactaatggcaagcaaaaaacttcgcgtggtcggagtttttttattttggtatttaaaaggagaacgcacatggttgaatcaatcgaaaaaagctggtatgtcttacacacatattcaggttacgaaaataaagtgaaggcaaacttggaatcgcgtgcccaatcaatggggatggagaacaatgttttccgcgttgtggtgcctgaagaagaagaacatgaaatcaaaaacggtaaggacaaagtcgacatgaagaagactttcccaggctatgttttggttgaaatggtgatgtcagacgaagcttggttcgttgtgcggaatacaccaggtgtgacgggcttcgttggttcacacggtgcaggtagcaaaccagccccattattagatgatgaaatcacacaaatcttgcgtcaacttggcatgagcactcgtcatttggatgttgagttcaaagtcggcgaatctgtgaagattatcgaaggggcctttgctggccttgtcggtcaaattacagaagttgacgacgaaaagatgaaattaaaggttaatatcgacatgttcggtcgtgaaacagcaacagaattagactacgaccaagtagacgaactagtttagagtgcgacttcagtcgggatgactgaaggagcacgtttcgaaaaaagagtgcgtttgaaacggattgactctgagcattaacctaatttggcgaattggtgctacaagcgccgatttgacaaatgtagttaagcgcaagagtcagtttcaaaaagcacgtttcaacaattaaagtagggggctaggatttgtcccaagccccaacaagataggcggctgagacgaaagatgatttgtctcagccgctttttttgaacaatcaatagtgtctatttcgaaagaatgatgtgatgacgatgtggtatatcattgatcaaatattaactgcagtgggcttagtcatttttttgttagtcttactggcaggactggatttttacaaactaatccgggtttcggcacattggcggccgtgcgcacgtttatatacaaaacaaccaacgctattcattcatggctatcgggggaatcgctattcattcggtcacttactcggacgcctacaaaaagccggaattgctaagaagagcatggtcatttgggtgggcagaaacggtcgattgcatgtggatggagacgcggcgttgcaggctaataacccaacgattcaagtcttatttgctaataaccgcgccgatgtgcaagatcaagtccgttggttagctgcgattattgaacacttaaaagaagcgtatggcgttacgcaagttaatttagtagggcattcgatgggcgcaattacggtgttgcgttatttgttgacatcagaccatgccgtggtggacaaagtgatattgttggcagcgccagttaatgatccatcaattggtccggatacaccacttgttttttggagcgagttaaccagtcgtggaccagttaaacgaacacgtaattataattatttagccgtgcgggccaagtattttccaactgcgatcagtgtcttaaacattgctggcgagttactaggaactaatcgacacgatggttcggtagcagtcgatagtagttttgcattgcgtagcctattaaaaggacacgtgcgccattaccaggagatgttagttcgtggaccgggtggagcacatagcatgttgcacgaaaatcgtttagttgatcaagccattgatgatttcttgtggcgcgattaatggaatcgccttgctttttcggcaattgcttggtatattattaaggtatgttttcatacactagtgggagaccaaatataatggccatcttaaccacatcacggacttaaggaggtatgtttcgtggctaaaaaagtagcaaacatcgttaaacttcaaattcctgcaggtaaagcaactccagcaccaccagtaggtccagctttaggtcaagctggtatcaacattatgggctttacaaaggactttaacgctcgtacagctgaccaagctggtttattaattccagttgtgatcactgtttatgaagatcgttcattcgactttgtaacaaagacaccaccagcagcagttctcttgaagaaagctgccggtgttcaaaaaggttctggcgaaccaaacactaagaaggttgcaactgtaactaaagctcaagtgcaagaaatcgctgaaactaaaatgcaagacctaaacgctgcagacgttgaagctgctatgcgcatggttgaaggtactgcaagaagcatgggattcactgtcgaaggttaattcatgcttgacactttcagtcggattttcaatgaaagttgaaaaatcaagtgggaggtcaaaaaccgttcaccacaattgcaaggaggaaaaccctaatggctaaaaaaggtaaaaattatttagaagctgcaaagcaagtggatgctactaaagcatacactgttgaagaagcaatcgacttagtaaagaaagttgattttgcaaaattcgatgcatctcttgaagttgcatatcgtttaaacgttgatcctaaacaagctgatcaacaaattcgtggtgctgtcgtactaccaaatggtacaggtaagacacaacgcgtgattgttttcgctcaaggcgaacaagcaaaacaagctgaagctgctggtgctgacgtagtcggcgcagaagatttagttgaaaagatccaaggcggctggttagactttgacgttgccgttgctacaccaccaatgatggctcaagtaggtcgtttaggccgtgtcttgggacctaaaggcttaatgcctaaccctaagactggtacagttacaatggacgttactaaagcagttaacgacattaaagctggtcaagtggcataccgtgttgataaagctggtatcgttcacgcaccaatcggtaaggtatcattcgatgctgctaaattagtagaaaactttaaagcgatgcaagacgtgatcatcaaagctcgtcctgcttcagctaaaggtcaatacattacaagtttatcagttagctcaacatttggccctggtgtcaaagttgacgttgctagcttctaagttggtaatgcaaaaagcgctcatccgaaaggatgagcgctttttttgttgctataattaagcattaatgtcgataatttcgaattttgtgacatccactaaacctttatctgtaatccgcaagttcgggatgacgtcgagtggcattgcgccgagcttcataatcggatcgaagtgagcggtgacgtggagtttatcgtggcaaatagcattgaaggccttttgatgttcaattaaagtgtcgatgggttcgttactcattaagccgccgatgacaaatggtaatgttgcgatgacttggccatcccgaatggcaacgccaccgccttggctttctttgagcgcttcgatggcaacgaccatgtcagcatcgttggtaccgactactacgaggttgtggctatcgtggccgatgctggtggcaatcgcaccgttcttgatgccaaagccgttaagcaggccaaccccgacattaccagtgagatgatgtcgttcaactacggccactttagcgatgtcttcgtcaggatgatattggaaatcaccgtctgcagtgtgagcgaccggtaagacgagattttgtgtccgactgatgctttgtaagccgatcacgtgggctttatcgcttgtgaggttgagttttaattggtcagcggtgaatgtatcgaggtgtacggtttgtaacaagtcatcaaaaccagtaactgaatcttcagttgttagtaagtattcgccgctagcagcaactttttgaccatcgatgaaggtttgattcacactgaattgttcgagatcatcaaccaataggaaatcggccttcaaaccaggtgcaatcccgccgcggtcagctaagccggtgcattgggcagtgttgatggtggccatttggattgccatgatggggtcgatcccgtttgcgatagcaacgcggatactttcatccaagtggccggtttcacggagggttacggattgtaagtcgtcaccgcagagacaacagaaacgtgcgttttgcggcgtcacgcctttcaaaagggttggcatattcttagagacggtgccgtagcggagataaacatacataccgcgactgatgcgatcgagcatttcatcgacttgggtacattcgtgatcgttacgaataccagcagcggcatatgcgtttaagccttgttcttttaaagcgggtgagtgaccgtcgatgagtttatttgcgttgagtgaaacgagtaattcgtctaaaacgccatcatcagcattgacaacaccgggataattcatgaattcggcaaggccgtaagtgagattgcggtcgtaagaatcttggatttcagcagcggtaatcacagcaccagatgtttcgaggcttggattagcagcaggcacacacgagggcatggtgtacttgatatcaagtgctgtctttttggcagatgcgaccatgtattcaagcccccgcatgccagcgacgttcacgatttcgtgtgggtcggccaagatcgtcgttgtgccatgtggtgttacaagtgatccgaagacagcgggtgagacattggcagattcgatatgaatatgcggatcaatcaaacctggcacaacatattggccgcgtgcatcgataacttttggtgcaaggtagtcgtcgctgataccgaggaagcgaccattaccaatcgcgagtgtgccttcgataatacgaccattgtagacatcgacgatttttgcatttttaatgaccatgtcggcagcttgacggccagcagcttgatcaattagttgttttaaagttgttttatccatgagtaatctcctttatttagcaggtaattcgtgcattgtgaagagtaataataggaataagagcgcagcgatatacataatcggatgcacttttttacctttgccagcagcaatcatggtgatggggtaagtgatcagcccgaatgctaaaccgtatgagatattataggttaatgggacgcacagaataatcatgaaggctgcaaaagaagtttcgaattctgaccagtcgatgttgacaattgacttcatcatgaatgaacccacgatgattaagattggggcagtcacttgcgacgtcacaacggccagtaaaggtgagaagaataagcttaagacgaacatgatggcgacgaccacggcggtgaaaccagtccgaccaccagcagcaatcccagttgatgattcgatgtaacaagcagttggggttgaaccgaaaacggaaccggcaatcattgaggttgaatcggcgaaaagggctttgccgacttccttaggcatcttgttgtccttgatgaaaccagcttgttgagcaagtccgattaccgttccagttgtatcgaagaagacgctgaagaaaaagacgagaattacgacggccatttgaacattgaagacgttgtggatgttcataattgagacaccgaaagtgggtgctaagcttggaattgaagcgatgatgctgtgaggcattgcgattagaccagtcacgactcccatgatggctgtggccgccaaaccgatgaataaagcgctagggactttgcgggctaataaaacaatggtgacgattaaaccgaagacggtcaaccaaacgtgcggatctgaccaactcgtaatggtgacgaatgatttagcactaccgacgacgatgcccccttgttttaacccggtaaaggcgatgaataacccaatcccaacggccatggcggcttttaaattagcgggaatcgcgttaatcacgacttcgcggacttttaagaccgtgacaagcatgaaaaggagggaagcgacgaaaacaccggcaagtgctgtttgccaaggaattcccatgcctaaaacgacggaataggcgaagaaagcattgctgccgagtccgggtgcaacggcgattgggtagttggcgatgaaggccatggctaaacagccgaccactccagttaatgcggtggcgacaaagacggcccccttatctaggccggcgtcgcctaatatagttgggttgacgaataaaatgtatgacatcgcaataaaagtggtaattccggcgatgatttcggttttaatggtcgacccacttgccttaattttgaattgacgttcgaaccagttcgttcgtgtttctgttgcaatatcaatattcttatccattatgcacttctgaattagtattttaagaaccttggcattattgtacaacaaaacaatcgtgtttttaagaagaatatgaaaaatgtttattattttgtaaatattgttcgttatttggtgatgaaaagggtttattttatcaaaaaagagccattagcgtgaaaaacgctaatgactctctcataattcgcgattaatttagatggttgttaggacgtgattagcaatcgccaattcttcgttggttgggatcatcaagactttgatggctgaatcgggggtactgatttgacgggcacctgagccgttttcgttcaattcaggattgatttgaacacctaaaacagccagcttggcacagatatcagcacgtaaacgggcgtcgttttcaccgatgccggctgtgaaagtgatgacgttcgcaccaccgagttcaacgtggtagctcgcgatgaacttcacagcagaagtgataaacatgtcgtaggcgagtttagcccgtggattggtagcgcgtgttgattgaatatcgcgcatgtcagcggaaacgcctgaaacgccgagaatccctgatttggcgttcaaaagcgtgatgacgtcatcggcactcttatccaattcgttcattaagaatgggacgatggccgcatctaatgaaccagcgcgagtgcccattggaatgccttctaacggtgtgaagcccattgatgtatcgacaggcttaccattttggctggccgtaattgaagaaccgccacccagatgaagtgtaattaattttaaatcggcaacgggttctttcaaaaagtcagctgttgcttgtaagatatagctgtgactaatgccgtgttcgccatacttgcggatttgatagtcttggctgtattcataaggtaagccataaaaactagtttcatctggcatatcgagatagaattgactatcaaagacagccacttgagggacattagttggtaaaatatgcatcaaggtttcaatgcagtcaacttgcacgggattgtgtaaaggtgcatacttgtcgagttgttttaatgtatctaagttggtgcgatcaataatggttggtttttcgaacgtggtagcaccggcaacgacccggtggccgactgcaatgatgtctgcgggtgaatgaatgatgccattgtcttcaagttgtttcaaaagtcgaagaacaccatcttcataggaaagattagcaatggcgacttgttctttttgaccttggaacttgaaggtgaagctagcttctggtgtgttcatgcgttccatgagcccgcttgccagtaaggttaaatcagattgttggaatagttgccatttcaatgatgaactacccgcgttaacgactaaaatattattcaaaaaactgcacctcttacgattaattttcttgatagtctcaattttaaaccgttttttcagaaaaataaaataagtaaaacgtaatgctaggataactaaaattaagtgccgataatgattgacgctttatggaatccatgctatatttgtagttggttatttatgctaccgaagactcaggtgccaataggcttaatatcctgccgaggaagatacgttgaaatccctctctatgtcttggtggacatggagttttttatttttataaggaactcttgaccacaagttttacaaatctaatggaggtgaatcaattgagcgaaacaatcattgcaaaaaaagcacaaattgttgacacagttgttgaaaaattcaatagtgctgtttctatcgtcgttatggattaccgtggcttaacagtagaacaagtaactgaattacgtaaacaattacgtgaagctggcgtacaaatggaagttgttaaaaacacttacttgcgtcgtgcagcagacaaagctggttacgaaggtttggatgatacattcacaggccctacagcagttgcattttctaacgaagatgttgttgcaccagctaagatcatcgctaactttgctaagagtgctgatgcacttgaaatcaaaggtggtatgattgaaggtaaagtggcaacacttgatgaaatcaatgccttggctacattgccaagtcgcgacggtttattatcaatgttactttctgtattacaagcaccagtccgcaatgtcgcatatgctgttaaagcagttgccgacagcaaagacgaaccagctgcataatttaaaattgtgtagttaaaagtgttatcaaaaaatattacccacaaaatggaggaaacaaaaatggcattagacgtaaatgcaattgttgatcaattaaaagaatcatcaatcttagaattaaacgacttagttaaagcaatcgaagaagaattcggtgtttctgcagcagctccagtagcagcagcaggtgcagctggcgcagacgcagcagctgaaaaagacagctttactgttgaattatcagaaatcggccaagaaaaggttaaagttatcaaagccgttcgtgaaatcacaggcttaggcttgaaagatgctaagggcttagttgataacgctccttcagctcttaaagaagacgttgctaaagacgaagcagaagaaatgaaagctaaattagaagaagttggcgctgtcgttaacttgaaataatttaaatagagcgcccttggcgcttgtttagattttgagcactaacctaaaatcgggcatcgtggcgatctaagccatgatgcccgatttgtagttaagcgcagaaatctagcgccaatggcacgtttcaaaataaagtgcgtcattaacgggttgtttttgagcatttgcctaatcagccggtgatttgactgatgtagcaaagcgcagaaagcagttaatgaaagcacgttttatttctaaaagaaccccactaatgtggggttctttttttacatatttttttgtaaaacataaatggcgagttgcacaaaataacacgatgctaaatatggattccatatcttaagcgacagccattgctgttgagaactaaaaaggcaatcagaggatattgattgtcgggtgaacgggaatcggattgtgctccgggtaagtaataagcgaaaatcataatctaacagccatctaacataattgtcattttactgtgttttgccttgggatagcttataattaaattaattaagttaaggagcggttgatatgcgaaaatggggcaaacacatatatgaaggaattcagcgacacctaacgttgttaaaaggcatcttcatcctttcggtgatggtctttgttatcctagaagtcggccggattttccgggacttgaacggggaacaattgaaagcgagtttaacgacacaaagtccgtggaccttgctagcgatgctggtgattgggtttgtggcggtcttgccaatgctcaattatgatttcgtgattgcggagttgctgccggaggactattcattctggtataaagtcaaatctggttggatcgtcaatacgtttacgaacattgccggattcgggggcttcttaggtgcgagtttacgggccaatttctatggtaaaaaagcgtcacaaaaagaaatcttaattgcgatttcaaaaattgcgctgttcttattagccggcctgtcaatctggtgtctgattagtgtcgttttgatctttggctttggtattggtgggatgtatgccaactactggttatggctagtgggcggttcgttgtatttccctggtctgatgattagtacgcgctttaaaaatgcggcctttttcaaagatctttcgatgcaacgcgttttacgcctaacattagggtctttcttagaatggggttttgcgggcggctttttcttaacgattggttatttcttagagattaagggtgacttattacaagtcttaccacttttcatgattgccaacatcattggtgttatttcgatggtaccagggggcttaggaacgtttgatttgttcatgatctttggtctgagtgcagtcggcgttcaaaatgcggacgccgttgtctggttgtcattttaccgagtcttttattacatcgtgccgtttttagtcggcgttggtttatttactcacgatgcaggcagccggttaaatcattatttacagggcttacctcggcaggtgatgcaaaaaatcgctcatcacttcattgttttcttcctttatatttcaagcatcattctattattagtagcaactgtcccgaactttgcgattaccaacacagtgattggacagctctacccatacacgttcttcttcttagatcgtgtgacaaacatcattgtagcgtttgtcatgttggccttagcccgcggcgttgccaaccgcgttcaaaaagttttctggccgttgatggtgctattggtgattgcgattgccaatacactatggcgggatttctcaatcaaactcgctgtctttttaacttttgtgctcgtagctagtttcttattgaaacgcgaattataccgtgaacggatcgaattttcatggaatgatcggattgtggatggtgtacttttcgtgggcgccttcttgttatacggctttgttgggattgccaattcgccacacttacggcatcgcaaacccgtaccaacagcgcttttatttccatccgaaagagtctggttggctggttttatcgggatgttggttgccgcagggaccttatatctcgtctaccgttatctcagtcgagggggccgttcaatagcagcgccatatgatgaagcacgaattgctaacgtgattaacacttacggcggcaatgaggtcagtcatttggcatacttacgggataaatcagtttatttctatcaggaagaaggagaagatcaggtattcttgctttatcgtaaaaaagcggatcgcttaattgtaatgggtgaaccagtcggaaatccggctaaaattttaccggcaattgaacagatgatgcacgacgctgatttgattgattgtcatttagcgttctacgaaatttcaagtgaattaacgatgcaactgcatgaaatcgggtttgactttatcaagtttggtgaagaaggctacgtccgtttggcggacttcacgatgactggtaagaaacggcgggctgaacgcgccttaatgaataagtttgaacgtgaaggctatcaatttgaaattttaaacccaccatttagtgccgaattaatggcagaactcaaagcggtttctgatgattggttgggtagtcgcgttgaaaaaggcttctcgttaggctttttcgatgaagcatacctccaaaaagccccaattgcagttgtctataatgccgatcaccaattaattgctttcgctaacgaaatgccaacaggaaccaaagaagtcgcaagtattgatctaatgcgtcacagacaagacgcgccatctggtataatggatgagatctttattaatctctttgaacaaaatcgaacggatggctacacgtacttcaacctcggcatggcgcctcttgcaaatgtagggacttccgagtttagctttattgaagaacgaatcgctcatctgatctatgaatacggctatcacttctacggattccagggattacggacctataagaagaaatatacgacggaatggcgttcgaaatatatcgcttatcaaaaacggacctcattaattttcacgatggttcaagttttaatggtcgttaatcaacgggttgcggatcaaccgcatcctggtggcttgctaggtcgtttgatgaagtcagttcaaattgggaaattttcagataactaacgacaaatgaggaaaaaagatgacagagtattactattctaaaaatccagacgttgaacacgctgagcggcaatggacgtttgaattacgcggctttaattttaaatttacaacggataacggggtattctctaaaagcactgttgattacggttcacgggcattgctagcagcggtcgatctgagtgaagcgccagctggtccagtgcttgatatggggtgtggatacgggccaatcgggatgacgattgctaagctcgcaccagagcgccgaatcgacatggtcgatgtgaatgaacgggcattggatttggcacgtaagaacagtgaattgaatcagattaccaacgttactgtattcgaatcagctgaatatcaaaacgtaacggatcaatacgccgccatcttcaccaacccaccaatcagagcgggaaaagatgtggtgcaaaatattttgactggtgcctatgatcacttattaccagatggtgaattgaacgttgtgatccaaaagaaacaaggtgccccatcagcgaagaaaacgatgatgagcatttttggcaacgtgcaaattattcataaggataaggggtattacattctccaaagtattaaattaaagtaaggaccggggttgaaagcggtaaattcaggcgaattgtgctaaactatgattaaagtacaaggaggttgatacgatgaaaaccagatataaaattttaatcggcgtaggggtgactgcagcagttggcgcaacgaccgcttttgtcggttctaaggcagtaatcgataaagtatcgcgctatcgcaaacgattagcagttaaaagttttgtaaaagacaaattacatggtaaccaaaaggcgttagagttggtcgatcaactctccgatgcggatgtgaataacttgttgactgcggcagacaggttaacccaattaaaagataagcttggcgaacacgcagacaatctaccagatatgatggatgatttgcgccaaacactaatggcttacgcaacaaaggtgaaagaaaaactatagagtgcgactcgagttggtcaggctttgagcattaacagtgaaatgagcattatggcagtccttgccataatgctcattttgcagttaaacggaagaggatggcttatggagcaattaaaaatggtatcgacaatccgtcggcaccatttttaattgctcgactagcgcgactgtgttttaatagttgagaagtaaaataaaggggcgactaacgcgtgagtgaaacacaacaagagatcgatcaatggatgcaagccgccatcgatgaagctaaccaagcacgcatcattggcgaggtaccgattggcgccgtgattgttaaagacggacaaattattggacgggggcataacattcgcgaacacgcgcaagatgcgacgttacatgctgaaattctcgcgattcaagaagcctgtatggttgaaaagagttggcgtctggaagataccgcgatttatgtcacgttagaaccatgcccaatgtgtgcaggcgcgattatcaatagccggattcccaaagtttattttggcgcgagtgatcctaaggctggtgtgaccggcacgttgatgaatttattaactgacaaacggttcaatcaccaagctgaagtggttggcggggtgcgagaagctgaatgtgcgagtttattgcagactttttttagaaagattcgcgaaaatcgccgtaaaaaaaaagaaaatggctggtaattaatgcttgaatcaggtagaataggaattgccgaaaggccttgagacaatgatgagcctacgaatcgtgtcaggttcggaagaaagcagcactaagtttgttttatcatgtgtcttaagttttgtgaaaattaaccagacccaacggacaattaattttgtcggttgggtcttttttcatgcaacgcaatcaaaattgacggtaaaatatgctaaaatggaacaagtagttttaaatgaatcggactttaaattgcaaaggtggaggtcattaaatgagctatcaagctttataccgggtttggcgcccgcagcgtttcgatgacgtgattgggcaagaaacaatgacccaaacattgaaaaatgccattatgacgcaccaaacaagtcatgcttatttatttacaggcccacgtggaacagggaaaacatcggctgccaagatttttgccaaggcaattaactgtcattatcaaaaagatggcgaaccatgtaatgaatgtgagacatgtcgggccattacggctggcgccctcaatgatgtgattgaaattgatgcggcgtctaataatggggtcgaagagattcgtgatattcgggataaggccaaatatgcgccgacccaagctgattataaaatttacatcattgatgaaatccacatgttatccactggtgcgttcaatgcactgttgaagacgttggaagaaccaccaacaaatgtggtattcatcctcgcaacaacggaagttcacaaggtgccagcaaccatcatttcgcggacgcaacgctttaattttaagcggatcacggccgctgatttatttaagcgaatggcttatattttagatcaaaaggaaatgacctatgatccagcagctctgaaagtgattgccaaagctgctgaaggtgggatgcgggatgctttaagtattctcgatcaagtgttatcctttagcgacaatcacgtcacgttggataatgcgttggatgtgacaggcagcttaaccgaagcgttgttggcggattatgtccaaacaattcaggataatgcgcctaaacaagcgttgcaattgttgcaacagattttggctgaaggtaaagatgcccaacgttttgtggaagacttaattgaatatgtgcgcgacttactgttgtatcaacaagcacccgaattagtcgccgcaagtgaaatggatctattggatgaacacttcaaagcgctcagtgcagcgatgccggctgaccgtttgtacggggtgattgatatcctgaatgaaacgcaacagcaattgcgtttcacgaaccatccagaaatctatctggaagtcgcaacggtccgcttgacgcaagtccagacagcccaagtaacgactacgatgggtgccgcaccagctgctgataatgaacaagtcgcagcgttgagtcaacaagttgcacaattacaagcggcgttacaaaaattggaagcggcgggaccagtgagtgctccagctgccaagccaaaggccaaacctgctaagaagattagtaaaaaggtcaaccgtaaggcgatttatccggtattggcagatgcgacgcggaccaatttggagaatctcaaagaagtctggccggatctgttgaatatgttggacgttaccaagcgcgccgtgatgaaggtttccgaaccggttgcagcgagtcaaagtggcgttgtcgtcgcgtttaactacgcgattttattcgagcgagctagcaatgatcaagaccttttgaacattttagaaaacggattgaatcgtttgactggcaaccccttcaaggtagttttagtgccccacgatgtttggccagaaattcgccaggaatatttacagaatcacgcagtaccaagtcaacaggtaacaactgatgacgaagcagaagcaacgccgaaaccagaacaaaaaccggccgttgtcgaacaagcacaagctttgtttggcgatgcggtggttgttaaaaaagattaacgtttaaatttgaaaggaagtaatgaagatgcgcggaatgggtaatatgcaaggtatgatgaaacaaatgcaaaagatgcaaaaagaaatggggcaaacacaagaagccctcaacaatacagaatttgtcggcaaagcagccaacgatttagtcgtggtcacaatgactggcgacaagaagatgaaagacattgccattaaaccagaggccatcgatccagatgatgttgatatgttacaagacctcattatcatggcaactaacgaagcgatgactgaaatcgataaacaaacacaagcccaaatgggtaaatttactaaaggcctcccattttaagtgagacattaaggaagtgcattgatgcaatatccagaaccaattgcgaagctgatcgaaagctacatgaagttacctgggattgggaacaagaccgcaacccgattagctttttacacgattgatatgaatgaagacgatgtgacgaatttcgccaagaacttaatttcggcacgtcgtgatctgcattattgtagtgtctgtggcaacattacggatgaagacccgtgcgaaatttgtcgcgatacaacgcggagtcaagacatgatcttagtggttgaacaaccgaaagatgtcatgtcgatggaacggatgaatgattatcatgggctctaccatgtcttgcatggggtgttatcaccgattgaaggcaaggggcccgatgatattaacatcgccaatttgattaaacgattgcaaaaaacaccggctaaagaagttatcattgctactaatgcaacacctgaaggggaagcaacggcaatgtatatttcgcggttgattaaaccagctgggattaaagtgacgcgtttggcgcacggtttatcagtcggtagcgatattgaatacgcagatgaaatgacgttgttaaaagcggttgaagggcgtcaagaaatttaagaatggtgggtttgcgatgtttggtagaaaaaaaccgacattaaaacaattaggtgatcaagccttattggatttagtgtaccaagtcaaagataaatggcagatggcccaaaagacgcaagacaacgtccgcggactcgatgaccaattagagatggaaagtaagattcaacaagcaaagtttgaattcttattccgccaagcccgccaacgtaaagtagcaggtgaagcagtttcgaaagaagcagcaactagaaatacatttagatagcgcgggcattcagatgacagccgcagcgtgaagacaaggtcgagtgactttgtctttttttatttcaaacgtctgctgtcgcacgctaaacgcaagaacataaccgccggatacgcactcttccctttacgtcttttgttgaatcaagtaaaatggaagtaactctatggatgaagaaggttgttttgtggtaggaaaattaattacgtttgaagggccggatggtgctggtaagacaagtgcgttgatggctgttgtaccgctacttgaatccaagtgcaaccaagacatcattgttacgcgcgaaccaggtggcaatccgattgccgaaaagattcgcaatgtcattttagatgttgaaaatacggcaatggatgaccgcaccgaagcactgttatacgctgccgctcggcgacaacacattgttgaaaagattgaaccagcgttggctgataacaaaatcgtgatttgtgatcgatttgtggatagttcaatcgcttatcaaggggcaggtcgtggcatcggtgaggaagtcgttgcgcaaatgaacttatttgccactaatggattagcgcccgatttaacgttataccttgatgtaccatctgaagtcggtttacaacggattaaacagaatcgacaggatcaatatgatcgattggaccaagagaagttggcttttcaccaaaaagttcggcaatcctacttacaacttgcgcaagataatccagagcggattcaaacgattgatgcgaccgcagacttagacacagttgttgccaaatgtctgcaagtgattgaacaacgatatccagacttattcacagcatagaaaaggggagattgaaatgaaattacttttagcaattgttcaagataaagatagcaacttattaagcagcgaattaatcgatgccaacattcgggcaaccaagttgtcaacgactggtggcttcttaaaatctgggaatacaacgtttatcgtcggaattgaagacgaacgggttcctgaagcgcttaagattattgaaaaaacgtgtcaggcacgcgaacaattcatgacaccgcctgttaatatggatgccacgatggatagctcaatgtcatatccgattgaagtgcaagtcggtggggcaaccgtctttgtgatgccgattgaacagttccaccgcttctaatcgatggccagtttaacaattgaacagcttcaacccaaacttgtggcccagtttgcccagattatcgcgcgtggacagatggcgcatggttatctattagctggtgcacagggattggggaagacacaattggcacagtggttggcactgcgtctgttctgtcaacaagtgacaccagatgggcaaccttgtcggacatgtccggaatgtcagcggattttgacgcataatcatccggatgtcattgaaattaagccggaaggtaagagtattaagattgccgatattcgctatttgaaacaagaagtggctaagagcgggatggaatccagtcaacgcttattcattattgaagctgctgaaacgttaaccgccagcgcggctaatagtttgttgaagttcttggaagaaccggcgcaaaatgtttacgcgattttatgtacgagtaataaaaatcaaatgctccccacgattttatcacggcttcaagtgattgatctggcagcattggcaccacaaatggtgcaacaacagtttgaagcagctggtattttgccacaacaagcgcagttattggtgcatttgacgagtgacttagctgaagcacagaccttattggcggatgattggctattacaagtcagtgcgaagcttgccgcgtgggcacaaaaagttgaacaacgtgatttagaagcatttgtgcagattcagacgcaaattttaccagtattagttgatcgccaacagcagaagacctttttaactttggtgggcttatggtatcaagatttattgaattaccgctatgaattaggcgtcacaccttgttttggtgcgtacgaaagccagttaaatcaggccagcgccgcgttgactaccacgcagttggtcgctcagacggaatatgctttacaagcacaacgcatttttgaacaaaatattagttgccaaaacgtcttagagagtttaacgttaaagttaattgcatagtaaaacgcataaccagcgtatcgggaggatatcaacggtgagtaaagacttatatgaacagttatcagacattgaacagcaagctaaattgacgtttgaggggctcagtgaaatgaaagcagtccttgccgaagtccttgagaaaaacgctgaattaaagattgaaaacaagcacttgcgggaacatttgcaagaattggaaccatcagccaccccgcaaacgggtaaggaagggtctcaagccctttcgaaatcaaaacaaaacttacagaatctttacgaagaaggcttccatatctgcccgtacttttatgggtcacgacgcgaaaataacgagccttgcgcattttgtaatgatgtcatctacggcgaacgaacaaatgattaaaaaaggcagggcaaaagggatgcttacttttggcctgtctttatgtcattattgatggatcttgaaaggatagaacatgcaaacacaatcaagttttaaaacgacggaaatgggaactttatttttagtaccaacccccatcggtaacttaggcgatatgacctaccgggcaatcgatacattgaaatcggtcgcactgattgctgctgaagatacacggaatacgcagaagttattgaaccactttgagattgaaacgaaacaaattagtttccacgaacacaatacgcaacaacggattgaaacgctgattgaaaaattagaagccggtgacgatattgcgcaagttagtgatgcggggatgccatcgattagtgatcccggtcatgagctcgttaaagcttgtattgaagcgggcatttcagtggtgccattacctggagccaatgccgggattacagcgttgattgcttcgggcatcacaccacaaccgtttacgttctacggttttttgcctcgtaaaggcaaggagttaacggaagccgtaacgacgttggcacaaaagcctgaagcacttatcttctatgaagcaccgcatcgtttgaaaaagacgttgcaagctttgctcagtacgtttggcgccgaccgcaaagtcaccttggggcgcgaactcacgaagaagttcgaagaattcattcgtggcgacctagaagaagtgcttgcttgggcgactgaaacagaattacgtggtgaatttgtgatgatagttgctggaaatccagcaccagatgcaacggtcagtgcagttgcaacggaatcgctatcccttcctgaacaagtggaagcccagattcaacaaggagccagccccaacgtggcgattaagacggtcgctaaagcaaatggcttgaaaaagcaagtcgtttataatgcctaccacgaattaacagaatagaggtcacgccatgccaggaaagcaatattcagaaaactatcaaattccgtatttcgaaacggatatcaagggcgaattaacgcttgcatccttggtgaacattttaattttagcatcagagcatcaactcaatgcgctcaacgtcggtgaagcgacaatgcatgcgctcaatcttggttgggtggtcacgcagtatcaaatgaagattacgcggatgccgaaggtggatgaaaaagttaaaattgtgactgaagctgagagttacaacaagtatttctgttaccggaatttctggttatatgatgaagccggcaacgaatgcgtcttcgtccaaagcatcttcgtgatgatgtcgtatgaaacacggagtatggtgcaagttgtgccggaaatcatggcaccattcgagtcaagtgagattaaaggtagcaaacgattcccacggattaagaagattgatcccgaacaagtgacgaccaaagaatatcgtgtgcgttatttcgatattgatggtaatcaacacgttaataacgtccattattttgaatggatgttggatgcgctcgattatgacttcttgacgacgcaccgcgtagcaagtatcaacatccgctacggccacgaaattcaatacggtcaaatgacccaaagcatggtcgaacaactcatagttgatgatataatcacaacacggcataaagtcgccgtggatgacctaagtgcagcagaagcagagattacgtggaaagagtgctgagtcgaacgggttggctttgaggattaacgggataattgggattatggcgggtcttagccataatcccaattattcagttaaccggaaaaggcagttcgaggaagcgcgtttaaacgaaagaaagccccattcacagataaagttgtgatggggctttcttttgttatcttcgaatatttattgaaacgtgctttttgaaacagctccctgcgcttaacccaagttaccaaatcggcgatttcatcgccaattcggcaaatccagttaatgctcagaagctaaccgtttcaaacgcactctatcgaaaacgtgttttcatcaacagcttcctgcgctttgctacacttatcaaatcggcgcttacagcgtcaattcgctaagttaggcaagtgctcagaagctaaccgttgatgacgcactctatgatgttgcgttgctgacaaattcttttaatgctgcgcctgttttgcctgcgctgaggccgacttgtagtttgaggcgtgcttttggtccattgaggccttggcagaaggtgacgcccatttgtttaagctttacaccgccgccttggtaatcgtagacgtcttcggcaatcccgttgaaacagcgagaaacaagtacgatggggatgttgcgatctaatagcgcttgaacagcgggtaaggttgctggtggtaagttaccagccccgagtgcttcgataacgagccctttggtgttgggttggttgatggcgtcgaataaagtcccatccatgccagcgtatgcttttaaaagataaacaggttcgacaagggttttgatgtcgcaaatttcagaacgaattaattcttggaagaaattcgcattgtgtttgctgaccaaaccgatgggaccaaaagttggcgttctaaaggttgcgacgttcgtcgtgtgcgtcttcgtgacataccgtgctgtgtgaatctcatcgttcatcacgactagcacacctttatcatgagcatcgtcagaagcggctgtccaaacggcactaatcaagttgtgtaatccgtctgcgccgatttcattcgacgagcgcatcgcaccagtcacgacgacggggatattgttgggaagtgtcaagtctaagaaataggcggtctcttcgagggtatccgtcccgtgtgtgacaacaacaccatcaatcccgtcttcttcagcttgttgaattcgattcttaaggtttaacatcacagcgggtgtgatgtgtggtgaaggcagattggcgaactcttcactttcaatgattaattgattatcgaacagcttttcaaagccggccattggattttgatctgtgggtgcaaccgcgccatcttcgtccgcagacattgcgattgtgccaccagtatggaggactaaaattttcttcatgtttaatgaacacctttctttaaatccgaattactcatctgtaagtatagcaaattttctgcaagagttgctgaaaaatgaaaatcaattgcttgtaattaaataacgttagtgatacatttaaggggttctaaaaattcggagtaggactgaagcgttaagtgctggtggaacggaatgtggacaccagacgaaaagcagcaatgcttgcgatttcagtaccgcattcgccgcagtattatttgtggcagctccaaaagggagatgctttttatggttaatggtcagatttttggtgttaagctagacactagacgcgttgttttactagctgttttaattgctttacaattggtggttgcacgctttgcaatttcactaacgattttcagaattagttttggattcatcgtcaccgccttaatggggtggtggtttggcccagtttgggcgggacttgccgccgttattggcgacctcatcaatagtttgatgattggggtcccaggtggttatttcccaggcttcacactttcagcgtttctaggggctttcatctatgggtgttacttctaccgacaaaagattacatggtggcgcgtgattgccgccgttgtgacagttgtgctgatcgttaacctcggtttgaattcatggtgggtgtcgattattagtcatacaccatttgggttccactttacggcgcgggccattggggaagctgccacattagtgattcatccgattattctatacatcgtgatgcatttcgaaccgattattagattaaaagatagagtattataaatgagtaggtgttatctatttgaagataacgcctttttttgtggaaaccggctttttatgctagaataacaaggattataagcagaagaaggatgaaataatgaagctattggcaatggatacctcgaatcaagcggtgagtgtggcactccttgaagatcatcaaattttaggcgaaatgactgttaatattcgtcaaacacatagtcagacgttacttccaatgattgatcaactattaaaacaaacaaaaaccaccattgaagatatcgatcgctttgtcgttgcagaaggtccgggttcatacacgggattgcggattgcggtgacaacggctaagtcttttgcttggacgcttaataagtcattggtcgggatttcgagtttagcattgctagcggccaatgtgatggatacgaccgccttgattgtaccgctgtttgatgcacgccgcgacaatgttttcgcggggatttatcagtggcaaaatgggacattgcaaaccgttgtggccgatcaacacgtttcactagaagcactactggcacaattacaattattggcagaacctgtttattttgtggggaatgacgttgcacactttaacgaacagattcaagctgcattaggtagtaacgcgcatttcgtgtccgccaaccataatttaccgcacgccagcgtcttgggtgaattaggcttgatggctgaacctgtcgcggatatccatggcttcggacccgtttatttacgcaagacggaagcagaagttaactgggcaaaaacgcatgatgagcgaggcgctgattcgtatgtggaacaagtttagggaatacctcaaaccccagatttgggtcaagaaagaaatgccttacacaactcggcgcgttgaaattgatgagacgacattttacttagcacgcgcgagtcaaaatgatattacggcattgttggacattgaacggtcggtctatgccggtcagacgccgtgggatcgttggaccttcactagtgagttgagcaagcgcaagacatcgttgtatctggttttatgccaagggactgaagtcgtagcgtttgtcggtgcatggttttcaaccaatgaagctcatattacgaatatcgcggtgcggccaagttatcaaaaacgtggtattggccactttttggtgcacgaaatggttagtttagcccacgattatcccagtcaaaaaattacactagaagtacgcgccagcaacacaagcgctcaagccgtttatcagcgattgggttttacagtggtgcggacgcgtcccaattattacattcaggaaaaagaagatgcattcagtatgtgtcggatattgagtcaataggagtcagtcatgtcggaaaaacgagaattaattttagcatttgaatccagttgtgatgaaacgagtgtggccgtcatcgaagacggtcatgttattttaagcaacatcattgctacccaaattaagagtcatcaacgttttggtggggtggtacccgaagtggccagtcgccatcacgttgaacaaatcacagtttgtacacaagcggctttagaagaggccggggttacttacgctgatttaacggcggtcgcagtcacttatgggcctggattagtcggcgccttattaattggcgtgacagctgccaaagcgattgcttacgcacaccacttaccattgattccagtcaatcatatggcggggcatatttatgcggcgcggtttgttaagcctttagaatacccattgttagctttactggtttcaggtggccatactgaattggtgtacatgccagccgccggcgaattcgaaattatcggtgatacacgggatgacgcagcaggtgaagcctacgataaaattggtcgcgtcctcgggattcaatacccagccggtaaagaaatcgatcggcttgcccacttaggtcaagatacatttaaattcccgcgtgcgatgctcaaggaagataatcttgacttcagctttagtggtttgaagagtgccttcattaacacagtgcaccatgccgatcaaatcggtgagacgctgaaccacgaagacttagccgctagtttccaagcgagtgtggtcgaagtgctcaccactaaaacgatgcacgccgcgcgtcaattaaacgtgcgccaactcgttgtggccggtggggtggctgccaatcaaggtttacgtgaaggtttggcgacagccattaaggcatccggaatggatttagacctcatcatgccaccacttcgattatgcggcgataacggcgccatgatcggggccgcagcgcatatcgaattacaaaaacaacaatttgctgatctaagtttaaatgcagtccctggtttggattttccatacggtgcataaaatacgaattcaaaaagcctgtcgataatttcgacaggcttttttgcttaaatggattgcttagttgattgtaaggtagtatagatgtccgtcggcagtgccactatcaacggactgagctgatccacgccaatcagtgttaaatcgtgcatagcacgtgtgacgagtgtgtagaggagatctacgtctgattgtgcgccgaaggtcttcttagagatgtcgtagccaatcacagcgtcgaactcgagccctttggctaaatataatggaaggattaggatgcctttgggtaaactacgggttgtttcaccgatgagtgtgacgtgttcatcaggtgttaaactagcgtagagttggtgggcaacttgttggttcttggtgaggatcgcaacggtcgcgtgttctgcctggagatggcggatttcttgggtcagtgtagcgagcgcttggtcgtttggcgtctcaatgacgcgcggtaggcgcccgtcacggctgaaggcttggagggctgtttcttttggcaagagtgccttggcgaagttggtgattggggcggtcgcgcggtaactcttggttaagctaatttggttgatttttaagcggggaaaagcagcggtcagttgatcgatgaagtggccggtttggtaggtcgccgtgaagacatcctgtgcgtaatcgccgagcacggttaatttcgcgttgggaaaggcgtggtggatgtagacgaactgagcgatgctgtaatcctgcatttcatcgatgaagaggtactgaatgccgtgattttggccgctgtcagttaataagtcgcgcaggtatagaattggggcggcgtcactgagcccgacgatgtggcgttcattgttatccgcgacttggcgaatcatggcgtcccaaaccttcgtagggatgtcggcagggcaagcaccacttaagaagtgttgatattctgtggattcatctaggaaataatcattgtagattgattcatagagtggggcgaaataactttgaacgatttcacgagcgatgaaagcttgttcatcatcgccagaatcgaattcgcggtcaccgacaatcgtccggtaagcatcatcggttaaggtatcgattttttcagcgacccagtcgagatgaacttcgaggttgatttggcgtttaagccgtttgatgagcgtgtttttagtggcgaggaatttgtcgccgggtaacatatttgcggggagcgcgagataaatctgattcatctggtctttagtaaaaaatgggcggtcttcgaagtatagatcgttgaatgccaacggttgggttgaggcttgtttaacgtaagcttcaattgcgtgcatgaacgctgcgctttctttataccggcgcatggcttgtgtcatttcaggaaaactggcttgatctttttcgaagcggtcgaagaggttctcaacctgtaagcctgagaagcgatgacttaagaactcggccatcgtcacttggcgcatgtttttctcgcctaaactaggcaggacttctgaaatataatggctgaataaacggttgggtgagaagagcaccatttggtcggcttcgagctgactgcggctgtgatagagtaaaaaggcgatgcgttgcaagacagctgaggttttaccactaccggcgaccccttggacaatcagtaagtcagcggttgtatcgcgaatgatatcattttgttctttttgaatcgtggcaacgatgttttgcatgtattcgtcactttgttcaccgaggacggcttgtaagagttcatcgccgacagtttcgttcgtatcaaagacgtgttcgatttgaccgttttgaatcttgaattggcgtttgagtttgaggtcaactttgacagggccatttggcgtctcataagtcactggaccgagtgtcccattatagtagatactcgaaacaggggcgcgccagtcgtagattaagaaattgtcttggtcgtcgataaaagtggcggtcccgatgtagagtgattccgtttcaccatcttcggtgatgtcaatccgaccgaagtaaggggagttgacgagatcggtcaggcgttcttgttggctagtcagtaatttttcgttttcgacagcggcggcgaccaattgcttttgttgttggaccgcggcgttggtttccatgcggtcatcgacttcggtaatgttgactttcgtattgtcgccgtaacgttgttcgatgtctttggtttcattgtaggcgttggccaattgttggttaatcactgtgaggcgttggtcgacctgtataactgtgcggtcaacgcgcgcttgttcttgttgttttgtgtcttcgtgtaacatagcagcctccaattgttagttgttatattataagcgtcttggggtaaaaaagcgaccgattgacattcattttaaaatccgttagtatgacagtaattcaacagacaaagtgaaggataagtagcaactgatattttcttgaacaggaagcggcgggactgagaagtcgtcaaggagttggttgtgaattgggccttcaatcgggaattagtgagtaactaattcgggtagcacccttatcgcgtgagtggcacggatgattttcgtgcaatttaggtggtaccacgtagaggcgtcctaattgtttaatcacaattaggacgctttttttgagttgataaatcaaattggagggtattattatgaacaaaaaaattatcttaaccggcgatcgaccaaccggtaaattacacattgggcattacattggttcattacgcaaccgggtagcgatgcaagattcaggcgaatacgaaacatttatcatgattgccgatcaacaagctttaaccgataatgcgcgtgatcctgaaaaaatccggaacagtctcttccaagtggctttggattatttatcagttgggattgatcccgctaaaacaaccgtcttcgtgcaatcacaaattcctgctttgagtgaattaacgatgcattatttgaaccttgtgacggtttcgcgtttacaacgcaatccaaccgttaaagctgaaatccaacaaaagaattttgaacaaagtattccagcgggctttttaatttatccagtcagccaagctgctgatatcacggcgttcaaagcaacgacagttcctgttggtgatgatcaagaaccaatgttggaacaaacccgtgaaatcgtacggacgtttaacaacgtttacggacaagaaattttagctgaaccagaaggggtcttcccaccaaaaggcgaaggacgcctacctggtttagatgggaacgccaagatgagtaagtcattaggcaatgcgatttacctatcagacgatgcccaaacgcttgaaaagaaagtgatgtcaatgtacactgatccattgcatatcaaagtaaccgatcctggtcacattgaaggcaacacagtctttacctatttagatgccttcgatgatgatcgtgaaaaagtggctgaactcaaagcgcaatatcaagctggtggtttgggtgatgtgaagatcaaacgttacttgaacgaagtcttacaagcgaagttcgcacccattcgtgaacgtcgtgctgaatttgaaaagaatccagaagccgtttataagatgttagaagaaggtagcaagaaggccaatgctgttgcagaacaaacccttaaagaagtgcgggatgcaatggggattaattactttaactaatcctattcaaattaaaaaaacagttaaacaagtcgctgaatgacttgtttaactgtttttttatagactaatatagtgggataatagatgctttttgatggtactttaaagttgaatatgagagacttaactcaatttaagacagatgtaaacgctgtttttggtgtataatttgagaagttatcaacatggagcaaaggagaattgatatgcatgatttaactaaaggtaatccgttgaaattaattatcttatttaccggcccattattgattgggaatatttttcagcaactctatagtgtcatcgataccttaatcgttgggcggacaattggtgttaatgcgttagcagcagttggctcaacgggtggattgaacatgctgattatcggtttttgtacagggaccacggctgggttgtccatcttgacagcccaacgctatggtgctcaagactatcgcggcgttaagcgcagctttgcgacgagcattctgattagtttggtgataaccatcattttgacagttattagtctattatttgctcgacatattttggtcatgatgaagacgccggccagcatcattgttgatgctcaacggtttattatgattatctttggtgggatttttgcctcgatggcgtttaacttactttcgaatatcattcgcgcacttggggatagtcgaacccccctctttttcttagtaattggggtcattgtgaatattgtgttagattttatttttattttaggctttcatatgggcgttgaaggggccgggtttgcgacggtctctgcacaaataattgcggctgtgttatgcttactatatatttatcgccgcattccggtcctcgttttacggccgaaggattttcgcgtgacgcgcaaagatgtcatggatcatctcaaggttggattgccgatgggctttcaatcgtcaattattgcaattggctcaatcgtgatccaaatcatgttgaatacattgggtgctagcgcggttgctgcttacacagcggctgggaagattgatcaattagcaactcaagttgggaattcatttgggattaccttggcgacatattccgcacaaaattacggtgcacgtgaatttggacgaatcagtaaaggggtccgccagacactaatggtgtcaatcatctttagtttagtgatgggcgcgttgatcattgcctttggacgaccactggttaacctgtttatcgggaacaatcaaccgtacgtgacggatttagcacaaatctacttccgctttaacagtagttgttactttattttggcaatcttatttgccattcgctacaccttgcaaggtttggggcagagctttattccaaccttagcggggattgcggagttgttcatgcggatttttgccgggatcttcctcgtgcagcaattcggcttcatgggcgcaagtttagccaacccactcgcttggattggttcatgtttggtgctattgagttcctatttcaagacaatgcaccaactgaagcgtcgtgaagcaggtaagaatagggaggaacaggatgtttaaaaagtatttattggtcggcttatcgttgaccatgttggcgttgggtggctgtcaggcgacacaatctagtcaaccaacgcacgagaatgcaccaacaattgcaaataaaaaacaagttaaaaaaacaacggcaatcttggctgagaagacctttaagtcaggcgacaatgcctatttagaagtgaaccataataaatcaacgttggatgtccgtcaatggcaaaccgaacggatcaagtatggtgcgttggatggtttaaatcggacaacgactaatacggctttcttatcgaaagagacgttaggccgttcaaacacacgccatcgtcaaacgtggcaaccaaccggctggcataatcaacccgtgatgattgatggccaacgggtctttcctgaaagtcgcggccatttgattgcatacgcgatttcgtttaatttcaaccgagatggtgttttccaaaaaggggaactcggcagtagcaataatccgaagaacttagcgacacaaacggtcttcagcaatcaacgtaccatgcagatttttgaagaccaggttcgccaagcactaacgcaaaataaaaaggtgatttaccaagtgacaactgtgttccgtggagatgaattgatgccccgcggttactgggttcaagcaatctcaacagataagaagttgaactttaatgcgtatgtttggaatgtacaacctaagatgcaatttgactatgcaaccggtcgcggccattacgatggatcgatggcggtggtggatcagtatgcaggcaatccttatcagaattaagtagaaccaaaaaaagcgccgtctcaagattaattgagacggcgctttttttgcttaatgcacaattactacttacttagaaactaaccgttttaaacgtactttaaacatgcttcgatagccataaccttccggttcactacacaacaaaaatcatggccggaaaccaccataattcctggtgataggctaatcttcaagtgataaacggctatctcagcactttatggcaggtcattgcctgctgccaagtataggtcgtaccattctcttctggtgagggtgactttgcctgcttcgcagatttgtgctaggcggccggggttcattgtgccgacaacgacttgcatgctggctggaattctgaggagccatgcgctagcaattgcgttgacgttggtgtcatgtgccttggcaactgattggagtgctgcgtttaattctggaaatttcggattatcgatgaagaccccttcaaacatgccgtattgataaggactccatgcttgaatggtcatattcgtgaggcgtgagtattctaataaaccaccatcgtgatgaatgctgcgcgcgtcttgcatattggtatgcacgccggcatcaatcataccagtgtgcatcaaactgaattggagttgattagcaatcaatgcttgcggcactgcttgttggagtaagtcgacttgaccgggattgaagttgctgaccccgaattggcggactttaccactattttgcaattttaagaaggcttcagcgatttcatccggttccatgagtggatcaggtcggtggagcagtaaggtgtcaacatgatcaagttgtaatcggttgaggctggcttcaacaccttcgatgatgtgttcctttgaaaagtcgtacatttttttgccaatgccgactttggtttgaacgagcacttgatcacggtcaatatgactggccttaagggcgttcccgaatttaatttcggaagcaccatcgccgtaaatatcagcgttatcaaagtaattaatcccatgttcataggcggtttcgagcattgtcagggcttcttggtcgctcagttgtgggatgcgcatgacaccccagacaattggcgaagccattaagccgctgccaccaacattgattttttgcactatcaatcactccttttatttgatgcttttaacctaccacaaagtaccattaatgaaaagaaaaggctttcctgaatttcaggtcgtcactggcgacaattttcggtatactaatcacaatagacaggagacagttagatgacagataagaaagcacaggcaccgcggctaaatccacaacttgagacggtacagcttactgcgtttgaaccagatgagacttatgaaggtttgtttttcgaagaactaacgttgaagcaaaccgaagttgagatgttattctttaaaggctgtttatttaaaaattgtcagtttgaacaagtcgactttaataactgtgattttcaagatgtgcaattcgaacactgcgcgttgttaaactgttcgttgacgaatgctcccttccaacgagtcgcgtttaatggttgccagttgattggttccgattttgcagaggctggtctgaatgatgtcacgttcgacacttgccaagcggattacaccggctttaactttgcgcggatgcggcatgtcgactttaaagattgcagtatgcaagaagtctcactcgggcaagttgattggcagtggctaacaatgatcgggaatcgtttgaacggcatggatatgactggcacgaatttgaagaatctcgatatcagtcagaatcaattcgaaaaagcgactttcacgctcgaattattacgtggggcgaccatcagcacagaacagacgctcgtgattatgagcgcgttgcgaattaacgtccgctagcttgccggtttttaaaggcaattatcagacaactgattgttgcgatgagcatcacaagcacagcgaagaaatcttggtgcaacagctggcagaggccgctgatacataaagcgatgaataaaataagtgggattttaaggttggctttcattggtcattcccccgtactttaatctgaaaaggcagcgacaaaatattgtggctgccttttcgtttgatttttaataattaatcttgtatgtcaattcaacaaaatgaccgatttgacggctattgataagttccaatggcatatcggttaagtgcgtgctgaccagtgaaatgccgtcacccaggagaactggcgcaatggtgatgatgagttcatcgactaactgggctttaagcaattcggtaaagatttctgcaccacccacaagccagatattgccaccatcttctttttttaattgacgcatgaactcaggaatattcccagcaacgacatgtgttcgatcttctgtatcatgtaacgttttcgagaagacatagccgtttttatcttggtaaggataggtgccggctaatttaagactttgttcatatgtcttacgccccatcacaacggtatcgacggtgcgttggaaagcttgaattgcagcgtctgattcggatgaatcgagtgcagctaaccaagcagtgctaccatctttttcagcgatgaagccatctagactctgagcaaggtataaaattacttttcgcgaatttggttctgtcatagtcaacacgtcctttaaattaagattacctttattataacagttttaaccgctttcatacattctaaaccgttggtaatttaactggatttggcttatcatgaaaagcaaagctgtttactcaaaggagaccaaaaatgacaactactgaattttccccagaaatccaaagtttaattgaccaagttcaaaagaattatcctcaacccattaagatccgggtcgcagacgcagcgtctgggatgttaaaacatgatcaggcacaacgcgttttaaataacgatggcagcttggcaatcttaattaccgatgcgacagcggctgattatgctctatcacacgaattattgcacttactattattatcaatcggttttccacaaatcatgaccgatgtcaccacgcaggatgcgcaacttgatgaacaattggttgcgaccggcacaactttgtacaatgccgctgtgcacatggtgattcaaaaagaacaagaatcccatggctttgtggatgttgaaactaaacaagcctaccttgaaggtctacgagataatctgaccccggaaaaagacgatcccgaaaatagatgggtgattttccgcgtattaacgctgttagatgccctcgtcttctttgatggtggcaaccaacaactgttaaaacagtggacggctgattatccgattgcgtttgcccaagccgaaattctctatcatgtgttggcacgcaaaacaattgattcaccattcacattacggcgggctgtgattaacttgtgggttgcgtttgatcgcgtgttatcaaccctaggatttgctgaaacgaacctccaacaactcttgacattaacgccggtattaagtgaacggcaactacgattagaagtgcgccaagtctacgatattttacattccgaaaatctatttgcgaccgcaatgaaccaaaaagcgtatgttggaattggtaagagtgatcaacaaaatgcttttgtcttagggattccagaagacaaggcaacaccggaatatttcaaacgattgtatgatttatcagtgcaaaccttcttagatgaaattggaatgccgtattcattaagaaaatgagtgcgttcaagctggtcaacttttgagcattagcacagggaagcgaattagcgacgcagtcgatgatttgattcacagtgctaagcacagaaagttagcttgaaaagcacgttaaagaacagagtgcgttaattcgcggttagcttttgagcacttgcctaatcagacggataagcgccaaaggcgattggccgactgatgtagcaaagcgcagaaagctgcgaattaaaagcacgttaaaaaggagtgatggtgatgacttttaaatcaatgttgcatgcggcacagcatgttgttttcttgacgggtgcgggcgtgtcaacggcttctggcattccagattatcgatcgaaaacggggttgtatcatcagcaagccaatccagaatatttattaagtcacacgaatttaatcaccaatccagccagtttttatgaatttgtcacgcagcagatgtattttcctgaagcaaaccccaatgtcattcaccaagtgatggcgacgattgcgaatcaaaaggggcagattatcacccaaaatgttgatgggttgcacacaaaagcaggcgcgcgggatgtgattgaatttcatggtagtttataccgtgtcagctgccaaaagtgtggccaatcagtgccttatcaggcctatttaaaggatatgcatcatcaagattgtggtgggattttgcgaccaaatatcgttttatatgaagaaccgattgatccgacggtgattgaacggtcgattcaggcgattgaagcggcggatttaattgtcgtggtcgggacgtcatttcgtgtgtacccatttgcgagtttaattgaatatcgccgtccagatgcccaattagtagcgattaatcaagaggcattacaatttgaaatgccagtcactatgatacaagcggatgcgacaaccgtttttgccgcactagcaactaaggagtgagcccatgttaactgaacactatcaaaaaattgatgcaattgatgcccaattggcggttttatttgaagaacgcatgcaagtcaccaagcaaattgcaacaatcaagcatgaacaaaaaatcggcttgacggacatccaacgcgaaaaagcggtgatggatgcgcgccttgctgcggttaaagatccagcactcgcagattacgtaagggatttataccaaacgttaattttaatttcgaaacaatatcaagtaaaattgatgaaggcgatgaaagaagcagaagaaaaataatgtggaaagagcgaaacggagacggagcgctcttttttgattgaaacgtgccgattcgaactgccttttccggttaacctaaaaatggcaatcatggctgaagagcgccataatccccatttttttgttaatcctcaaagccaacccgttcgactcagacactctaaacgtgccgagtctgctatatctttccggttagctatgtatcgcaaacaatcgacttcgtcgctcattcacgatgcgctgctaatcatcaagatataaccggcagattcagcactctgatttgaaacgtgccgattcgaactgccttttccggttaacctaaaaagggaaatcatggctgaagggcgccataatccctattttttgttaatcctcaaagccaacccgtttgactcagacactctaaacgtgcttcctgtcgcagtaatttccgcttaatctaaaaatggtattaatcctaaacccctggattaataccatttttgaattaatgctcaattgctaaccgcgacagtcagcactcttttgcttaatatgctaaaatgaaactaatttatgagatgtgaggctattgaactgtgactaaacgacgctataatttagcggtaattcgctatcgcgggactttactattattgaatcggattaagcccccatttgctgggctttggaatggcattggtggtaaaacagaaactgatgagacgccaatcagtggtatgcaacgggagttatttgaagaaacgggtttacaaaccaaccaatacacactccaaaatgcggggtggattgattggcacatcgatggtgaaccgattgcaccgattgacatttttttagtcgatattttaccaacggtgcaactaccactttatccggtcggaatgcgcgaaggcgtgcttcaattatttgaaccagaatgggcacaagctgctgataatcaaggaattgtggcagacttacaggccattttaccaactgttttaagcggtcagctcaatcggtatgacacggattttcatgcagatcagatgattttctttgaagcaattcccattactgaaccaagagaaggagaggaagcactatgatgacaaaggaccaaacgatgatggtcttgatggttttaaagaagaagttgcaagggattcgtttttttagagtcgtcgaagaactgttctcgttatacattatttttaaattcttaactgcaacgggcaaggtacagcttttaggggtggcgttttctgaggggcgcgccattagcttaatgttgctgctgctagtcatcgactttagcctatcgcggattcggttaaattataaacgcatgggacaacaattaattgtcacattgaaggatttaacggaacaagaagctttgttcattcaacaattccaacggttctagaggtgtggatatgataacaattggattaactacttggtcagaacatcagtcattaatgcccagcaaaaagcagttaacattaaacgactacgcgcaatttctgccagtggtggaggtcgatagtttttattacggcttacgcgcaccaaccgtcagcgcaaactggttgacgcaagtaccagccagttttcagttcattgttaaagcacaccaagcaatgacccgccaagaagactacgccgagtttacgagtactgaaaaagaattgtttgtgcggtatcgccaatcaattgaaccgctaattaaggccggccaattacaggcggtcttatttcagtttccgccattttttcaactgaatcaggaaaatagtcaatatttacgacaaattcgcgcgtggttaccggatgtgccaattgctgtcgaattccggcatcaatcctggtacgatgacgcttttaagcaacagatgtacgcctttttgaagcagctaaacatgacacacgtcatcacagacgaagcacaaacaccgacgaacagtgtgccgtttgaaccggttgtcaccaatccggcgtttgcgatgttgcgcctgcatggtcgtaatatggccgggtggcagaatccgggtgcccaatggcggaagcaacgaacattgtatcgctatgatcaagatgaattacaattttttgcggatgctgtgcggcagattaaaaatcaagcggaacaagttgccgtgatttttaacaataattctggtggggatgctgcggataatgctttgcaattacaacaattacttgggctagaatttcctgatttagccccgaaagcgcctgaacagattgatttattttaatgaaggcttagtgtgagttgtcgtttaaatgactgctcttttgtgctatactttgattacttatatggcattatttaagcaagtcgagaattgttaagattctcgtttttttaattaaggagcgaacctaatggcagagacaaaaccaacattttacgtaacgaccccaatctattatccatctggtaaattaacgattggtaactcatatacaacaatcgccgccgatgtcatcgcgcgttataaacgcttgatgggctttgatgtcttcttcttgacggggacggacgaacacggcttgaaactcgaacaaaaagcagctgaaaagcatttagccccacaagaatatgttgatggcatggctaaagacatcaaggcattatggcaaactcttgaaatttcaaatgacaaatttattcggacaacggatgaataccatgtcaaagcggttcaaaaaatcttcgacaagttattagcgcaaggcgatatctatcttggtaaatacgaaggttggtattctgtttctgatgaagaatacttcactgaatcacaattagcagaagtttataaagacgacgatggcaatgtgatcggtgggaaagccccatctggtcatgaagttcaacgggtcgctgaagaaacttacaagtttaagatgagcaagtatgctgatcgcttattggcttattatgaagaacacccagatttcatcgaaccggcgtcacggcgtaatgaaatgatcaataacttcatcaaacctggtttggaagacttatcggtttctcgaatctcatttgactggggaattcacgtttcaagtaatccgaagcacgtggtttacgtgtggttagatgcgttatcaaactatatcacagcgcttgggtacggttcagacaacgacgaattgtttaataaatactggcctgctgatgtgcatctagttgggaaagaaatcgtacgattccatacgatttattggccaatcttcttgatggctctagacttgccattaccaaaacaaatttttggtcatggttggttgttgatgaaagacggtaaaatgtctaaatcaaaaggcaacgtagtttatcctgaaatgttagtggaacgttatggtctagatgctttacgttactatttaatgcgcgcgattccatttggtaatgatgggacatttacaccggaagactttgtcagccggattaactacgatcttgccaacgacttaggaaacttgttgaaccggaccattgcgatgattaacaagtacgacaatggcgctgtgccagcttaccaagctgacgtgacaccgtttgatgctgacttacaaaagacagccgcacaaaccatcgaacaatataccagcttaatggatcaattgaagttctctgatgccttagataccgtttggcaattaatcagccgggcgaataagtacatcgatgaaacagaaccatgggtcttggcaaaagatgacagccgcaaagcggaactcgatagtgtcttagcccacttggctgagagtttacggattgttgcgctcttattacaacctgtgatgacgcatgcaccacgtgatatgtttgcacaattagggcttgatttcgatcaagttgcgcaacgtgaattggtttatgggacattcccagccaatattcaagtggttgctaaagggaccccaatcttcccacgtttagacttggatgaagaagtcgcatatattaaggatcaaatgggtcaagcgcaaaaagcgggcttagtgaacgaaaaagtgaaggctaagcaacaagcagctgaagccaaagctgaattcgatccaaaagcaacaacattagtcagtgaaaaggacgccatcaagtttgaagatttcgatcaaaccgaaattcgcgttgctgaaattaaggcagttgccaaggttgaaggcgctgataaactattgaaattccgtctagatgctggggatcaaggtgatcgccaaatcgtttccggcattgctgaattctatccagactatgaagcgttagtcggtaagaaagtcttagccgtcacgaacttgaaaccacgtaaattgcgtggcgaattgagccaagggatgttgttatcagcagaacatgacggacaagttgaattagcagttgtgccaaacaacttggtgaacggctcacaaatcggttaatttaaaataacagaaacgtcaaaagggctaaaaggcatttacattctgtaggccttttagcctttttaatggaaaagagtgtgttgccagtggttagcttttgagcatttgtctaacttggcgaattggcgatggaatcgccggtttgaaagtgtaacaaagcacagaaagctactggcaagagcacgttttaactgtcagaatgaggacactaaaaggagattgaaatgcaaatttttgattcacatacgcatttgaatgataccccatatgcagggcaagaagctgattttatcgcgcaagccgctgaactcggtgttgttgaaatggcgattgttggttcagatacagtattaaatgagggcgctttgcgcttagcagcgcaatatgaacctttatcagccattatcggttggcaccctgaatcagccaaagattatcacaaggcagaagaaaccgtgctgattgaccaattacaacgaccagaagtagtggcgctaggtgaaattggtttggattatcattgggatacttcgccacgcgatgtgcaacaaaccgtttttgcacggcaaatcgagattgctaaatccttgcatatgccaatttcagtgcacacgcgggacgcgttagaagatacgtacaagattctaaaagaaacagatgtccgtgattgtggggggattatccacagttttaatggcgatgttgaatggatgaaacggtttatggatcttggtatgcagatttcgttcagcggtgtggtcagttttaaaaatgcgcatgaagtccatgaagcagctaaagcatgtccattggacgtgatgttggttgaaacggacgcaccttatttaacgccgacgccttatcgtggtaagcagaatcaaccaggctacacacggtatgtggtagaagcgattgctaaactcagagatgtggcaccagaagaaattgcggcagcgacgtatgcgaatgcccaccggatttttaagttaggagcactatgaaaaaaacaattcaagaagtgattgttgttgaagggcgcgacgatacgaagcggttacgggaagttttcccagatgtttcgacaatcgaaacgcgcggttcagcaatcaatgaagaaattatcgaaaaaattgcgctcgctcaagaaaaacgcggggtcattgtctttaccgatcccgattttcatggcgagaagattcgtaaaatcatctctcaaaatgtaccgggcgtcgaacacgcctttttaccacggacagaagcacgtccggaaaaagcaggcggcagtttaggcattgaacacgcaaaaccagcggcgattgtccaagcacttgagcatctattaacacaagatgaagaagcagacgaacaaatcagtcaatcggatttattaacggcgggcttgattgcgggggctgattcaaagcgacggcgcgaattactcggcgaaattttgcacattggttacaccaacagcaaacaactttacaagcgtctcaagatgttccaagtgacgcaagctgaatttggcgctgcactattacaaattaaacaggaattaggagattaatatggaagatattgcaaatcccgagcgtacccggaaaattctcaaacgttacggctttaagtttaaaaagagcttaggccaaaacttcttaaccaacatcgccattttgaaacaaattgttgaagctggtgatatcaccaaagatgacgatgtgattgaaatcggccccgggatcggttctttaacggaacaaattgccagaaaagcgcatcaagtattaagttttgaaattgatgaacggttaatgccggtcttaaaagatactttgaatcactaccataacgtcacgattttaaaccaagatattcttgaagcggatttaaaaacgattatcgccgaacaatttaatggtaagcataatctcaaaatcgttgcgaacttaccctactacatcacaacgccgattatgttgcacttactagaagcaggcttgccaattgatcgcatggtcttaatgatgcaaaaggaagtggcagaacgaatcaacgctgaaccaggttcaaaggcttacggctcattaagtatcgccgttcaacttcattcagaagtgaacttagcctttattgtgcccaagacagcctttatgccacaaccgaatgttgattcagcgattgttgaattagtggggcgcaaagcaccacttgtaacggttgataatcaaaccttatttgatcaattggttcgtggcgcatttgcacaacgccgaaagacattatggaataacttgcaaaatcaatttggtaaacaagatgaagtcaaagcagctttaacaacagccttagaagcagtcgagattgcaccgagcgctcgtgctgaacaattgagtatccaacaatttgcccaattaagcgatgcgctgaataatcagccaatttttgctaaaaaagctaagtaagtaattgccaaatcgttggtacaatggtataattgcaaatttttcgtttatatggtatactatccctcgaagaggtgaagcataatgccaaccacacttgccaatattaagaacggtctcgatgggcatatcggagacaagttaatggttgtcgctcaagctgggcgcaaaaaagttacaaagcgaaagggaattcttaaagaaacctttccagcagtatttgtagtcgatttagatcaggatgaaaatgcttttgaacgtgtttcatacagctatgctgatttgttaacgaaatcgattgagattgagtttgatgaagaaccaattgtcctatagtttaaaatagaagaatagagtagcactcaaccaactggttgagtgctttttttgttcaaaaagcagattgacgaatcgccatatacttcacgtggttgattagttgttgacattcgtttgataaaacaatatcatatagaatgtttatgacgtatataaaagggagaaagaatatgtttggcaattggaaagagaacaaagtgaagttaggtgggttcattattatggtctgcttaattccgattttactattactaatcacatttaattttattaagtacgaacagaccactaatattaaacatatgaaagtcgcggttgtgaatcaagatcaatccgcaacatttaaaggggaaaaggtggcagttgggcaacaggtactaaaaacgttgcgtaatgatcaccaggttgattggcaatttgtcagtgctaaggatgcaaaagcgaacttagctagcggccgatacgcgatgcaggttgtcttaccgaaagacttttctaaaaatgcgacaaccgcgttagataagtcacctaaagtcagcttgttaaaagttgaaacgtctaagaaaaataactacatggccggcatgattacaacccaagtcgtgaaccaaatgaagggcagtgtcgttcaaaaaattcaagaagcttataatcaagccttgcttggtgcaatcggcacgctaggcagtggcgtacaagaagctagcaatggcgttaaaaagttaaacacagcagccggtcaattatcaaatgggagccaacaaatctatgataatttaaatgtgttgcatagtgggacacaacaattggcagatggtagtgcgccattggcaagtggcgtgcaacaattaacaactggtgctgggcaactttcggctgggcttggagattatacagctggcgccggtcaaattaatgccggtttaaaccaactagcagccaataaccaaacaattttagctggtggccaacaaatcagtggcggtgtcgaccaattagctgatggcactaagcagttgagtgcaaaactaactgaagcagccgatggaattgaatccagtttagatggtaatcaagaccaattaacacaattgaaagctggtttaggcgctttaaatgctggtattcaagagttagatcaaaaagtgaatcattccaataatgataattccgaaattatcaaagcagacttattaaagattgcggataatacaaaaaatacaggggcacttttacaggatagtggtgcgaatttaagtcagattaacgataaagtgtacaatactgctaaacctgatagtgttgcaaacagtttacaagatgcaggaaatcaactaaaagccttacaagatttagcggtaactaacggtaagtttgcaaagtttttaattcagaatccaactattttgaaagcgttgctggatattggagatgcagcaaaagcagacttgctgaatgctggcagtcagttagagtcttctggcacgaacatgaaggctattcaagccaacttaggcacgatgggcagcaacatgagtgatactggtgttcaactacaggctgtttcagatgaattaacaaaaacggctgataacatggcacaactaaaagccggaatcgcgaagatggcaagccaagaccaagcgccgttagcactaaatggtgctactcaggcgattgatacactgacagcggggttagccaaagtcgacactgggttgaaacaaaaaggaaatacgacctatacaatgggcggaattcaagctgctgacatgattcatgccggcttggttcagattcaagatggtctaaaagggaaagctggtcaacttggtttaatgtcaggcttaacgacttatctgaatggtgtttcgactgcagctgcggggagcaatcaattagtcgcgaataacaacaagcttaatgccggcggacaacagctaacaaatggtctacaagaattaaaccaaaaagcaccaacgcttgtttctggcattacacaaattaacgagggttcaggcttattggcagatggtgctggacaattaacgactggcttaggccaagcgggtgctgggattagcttattaaacgtcaagttaatcgatggtagcaagcaagttgccaatctttcaacaggttccgcaaatgtagaacatttcgtgcaaccagtcaaagatcaattactatcagatacaaatcatggcgcattaattaataccttctcgccattagtcttaacacttgtcttctttgttggggcaatgttgacgcaattaacactttatcgctatggtgaaacattggcacatagcggtcttaagcaacggatgttggttgtagctggcgtagttgtcgcacaagccttattaattgatatctttgcaaacctttttggattgacgattgcacaaccgttcgcattcttcgtcttaagtatgatgacgagtgcggtctttacccttgcatgtttagcattggataaactttttggaacgatgggaattttaatggccttcgggttattgttcttacaactcatcattacagggggactcttcccgaatgacatgctttcaggcttctatcgtggtgtggcaatcttcttgccagggacttacacgattagtgggttcgaacaagttgtcaacggcaatggttcacaactttggttagtcttaatcgtcttggtgatcttttgtgcagtgttcttcgccggtttgttcggcggagagttaaaacaaaagttaacgcaaacaccaaatagtcaagcttaaagatttgtggtacagttaagaaaataaataaaaaggtgggaaatattgtgaaagatagtcaattgttggatgaatacgttgaactttacatgtcggcgattaaatatgtcgaagacttggtttctgaaccaacgcaagcttaccaattgtcttttgaacaatatctgattatgaaagagattgctgatgataattcagtgagtctaattgatattgctaaaaaacgaggcgtaacacgcggtgcaatttctcgacagattcgtgttttacttaaattagactatattacacaagaaattgatcccgatgatcggcgccggttgattttaaatttaacgccgtctggtcaaaaaacagttgaagaattaaatccgaagatccataatcggtttgcctcgtggatggagacgtttggtaaggaaaatgccaagcagatgcttgatttaatgaatgaatttagacataagattatggtaaaagataatcaataatatcgactgaagagcactgacagatgattgtcagtgcttttttagatgcattgttaaaaggttggtttttacaagcagatatgagtataatgaaacaattaaatgctaggtaaaaggtgaatgtgatgcaacgaattgaaaaagcacctgctaaaatcaatctcagtttagatgcactctttctacatgacgatggggaacccgagtggcagatggtgatgacgtcgattgatttggcagactatgttcagataacattacgcgatgatcccgcaattgaggtccgcacatcaagtggctttttgccagaagaccagcgtaacctggcctacaaagcagctcaattattacaacacacctatcagattccaaccggtgctttaattgaaattgataagcatattccagttgcggctggcttaggcggcggaagttctgatgcagccgctgttttacgggggttaaacgaactatggcaacttggtttaacgcgcgaacaattggcgcgattagggctacaaattgattcggatgtgccatattgcgtatatggagaaaccgcccttgtcactggcaaaggcgatcagatcaaaccactcggatcattaccgaatttttgggtcgttgtcgtgaaaccggaagtcagtgtttcgacgccgcggattattcgtgcattggattgcgaccagattcaacagcatccacaaactgaggcgctggttgcagccgtcgaagctggagatttaaatgcaatgactcgcaatatggggaatgttttagcaccgattacgactgaacgttatccagttatcaagcaattaagtgagcggttattgcagtttggtgcggatgttgctcagatgagtggtagtggtccaacggtatttggtatctgtagtcagtattcacgggctcaacggatttataatagtatgtccggattttgcgctgaggtatatctggttaaaccattgaaaccataataaaacgccgacaatcaaatggttgaggcgtttttaattggcgtaggaatcgctttaatgggataaaagcgaacaattaagctctttttttaaaaaagactaggatttaaccgaagatttctatataattgattggtagacagtttttttcggaaataacagtaaagtaatatatagaggggtattcaacatgaaagttagaagaagcgatcgattaatcgatatgacacgctatttattagaaagaccacatacgttgattccattgacattcttttcaaaccgttacgaatcagctaagtcatcaatcagtgaagatttatcaattgtgaagcggaccttttttaatcgtggcacagggatcttagaaacggttccgggcgctgctggtggtgtgcgctacatgccaatgattaaacaagatgaagcagaagcttttatcgctgagatggcacaacggctttcagaaaatgatcgcttattacctggtggttacgtctatttatcagacttacttggacgtccagaagtattacggcaagttgggcgtttaatcgccaaccaatatgtgggtaaagaagtgacggctgttatgaccgttgcaacaaagggaattccaatcgcacagagcgttgcgatgtacttaaatgtgccatttgtaattgtgcgccgtgattcaaaaattactgaaggttcaacggtcagtgtgaactatgtttctggttcatcagctcgcatcgaaaagatggaactttcaaagcgcagcttacctgaaaattccaaagtcttaattgtcgatgatttcatgaaaggcggcggcaccgtcaatgggatgaagagcttgattgaagagtttgattctgaaatggttggcatttctgtctttgctgaatcagatttcgaaggcaatcggatggttgatgattacacatcaatcttgaaggttgataaagttgatattgaaaataaaacgttaagtgtcagttatggtaattacttaacaaagaatgcagatcgcttagcttaaacgatttgatagcacccggacaggttaattgtgcgggtgctttttttatttgaagtgctttcggacagtttccaagctttgtccgttgcataaatgacagcggtaacatagactgaagttatatttaagaggaggttactatgaaaaaaataatgaatgatccaagccaaattgtaacggagatggtccaaggtttagtgcggagttatccagaccaactcaaacaaattccaggaacagaagcagtgatgaaaatcgccgatttaaaacatcggccacaagtcgggattgtcagtgggggcggtagtggtcatgaaccaacgcacgctggttttgtcggcgatggcatgttgacggccgctgtgtgcggacaagtctttacatcaccaacacctgatcaaatttatgaagcaattaaagcagctgacgcgggccgtggtgtgttcttagtcattaagaattattcaggcgatgtgatgaattttgaaatggcgaaggatatggcggctatggatgatattgacgttcgctcaatcgttgttgatgacgacattgctgttgaaaatagtacgtatacgcaaggacgccgtggtgttgcggggacaatcttcgtccacaagattctgggtgcttatgcccgtcaaggtgctggtatcgaagcaattgaagaattagcgcaccaaattacaccgaatattaagacaatcggggtcgccttatctggcgcaaccgttcctgaggtcggaaaaccggggtttgaattagcgcctgatgagattgaatatggtgtagggattcacggtgaaccaggttatcgccgtgaaaaattacaagattcgaaacacctagcaactgaattagtcggcaagttaaaagaagcccaccacatgacggccggcgaacattttgcggtaatggtaaatggcttaggtgcaacaccactgatggaacaatacgtctttatgaatgatgtcttggacctcttggccgctgaaaatgttgaagtcgacttcacaaaagtcggcaattatatgacctctttagatatggccggtgtgtcattaacaattatgaaattaattgaacctggttgggttgctaaattagatgaaccagtcacaacgattggttggtaaaggagagataccatgttaacagttgaaaatacattgaaatggcttgaattgtttgatgcaaaaatccaagctgaaaaagattatctaagtgaacttgatacaccgattggtgatggtgatcacggtaataacatgtcgcggggcttgttagctgtgcatgacgcattgaccaagcaacagccaaccgatgtacaaggtattttgaaaacgactgcgatgatgctcatcagcaaagttggtggggcttctggtccactctatgggacagcctttttagaaatggcaaaactaagcagtacgacacttgaagtcggcccattgttggcagccggtttagaaggaattcaaaaacgcggacatgcacaagttggtgaaaagacgttgattgacgtttgggctcccgttgtcaaagcggttgaagatggtactttagatgtggctgcaattgaagctgccgtcgaatcgaccaaagatatgcaagcaaccaaaggtcgggcatcttatgtcggtgaacgctcaatcggacatgttgatccaggggcggcttctagtgggtatttatttactacaatgttaatggcgggggtattatcatgagtgaatatggtgttgtgattgtttctcacgtaccagaaattgcggccggtgtagcgcgtttaattaaagaagttgccgctgatgtttcagtaacgactgctggtggcacggacgaaggtggtattgggactagcgcaatgaagattcaaagtgcttttgaagccaatgccgggcaagaattgttagccttctacgacttagggagcgctaagatgaacctcgaattggcccaagaactaacggataaaacggtgcatctatacgatgttgctttaatcgaaggttgctatacggcagcggcattgttgcaagcagggacggatttagctgcaattgaagcccaattagcaccgttgaagattaaataagaagtaaaaactgcttaaaatgatgtctgttttggagactgagtttaagcagttttttatatagaataatattcaaaagaaaagatgatttttaataatgtaactagtaataactttaaaatattgttgaggacggtaatgtgattttaaaatacggtaagctatgtattaaatagatattgctgttatatttaaataaattaagaatgaatactatgattaacatattattaggaggattcaggttgaaaaatattattgttactggtggggccggctttatcggttctaacttcgtgcactatgtggtcaataaccacccagaagttcacgtgacggttttagataaattaacttacgctgggaatcgcgctaacttagccggtttacccgcagaccgtgtggaattagttgttggtgatatctgtgacgctgaattagtcgataagttagttcaaaagacagacgcagtggtacactatgctgccgaaagtcacaatgataactctttgaaagatccttcaccttttattcaaacgaacatcatcggttcatatacgttgatcgaagcttgtcggaagtataatgtgcgttatcatcacgtttcaaccgatgaagtatacggtgatttaccattgcgtgaagacttaccaggacacggcgaaggcgttggtgaaaaattcacgcctgaaacgcgctataacccaagcagtccttactcatcatcaaaggcgagctcagacttgttagtgcgtgcttgggtccgttcattcggcttacaagctacaatctcaaactgctcaaacaactacggaccttaccaacacattgaaaaatttattcctcgtcaaattactaatattttaagtggtattcgaccaaaactctacggttcaggtcaaaatgtgcgtgactggattcatacgaatgatcattcaagtgccgtttgggcaattttaaccaaaggcaaaatcggtgaaacttatttaatcggtgccgacggcgaacaaaacaacaaagatgttttggaattaatcttagaattaatggggcaacccaaagatgcttacgatcaggtgaaagaccgtcctggtcatgacttgcgttacgcgattgattcaacaaaattacgtgaagaattaggttggcaaccagaattcactgacttcaagtcaggcttacaacataccatcgactggtatcgtgacaatgaagactggtggcaagcagaaaaagcagctgtggaagccaactacgctaagaatggtcaataaatatgaaattaaattttgatgggattatcttataattaccgttgttcatataagtgtcctgtccgtaataataaaccgttaattgtatcagttaatgtcatttttagggcagtgattacttttgaaactgattggggatgacgactgcggagccattcagcggtgtaagcaactaatgcgttggaaagaaaactaagtaaaaaggcttggtagtcggtggataacgtaatgtgatgggcgctagcaagatcttgaataatccgattaatcagttgatggacgtgatgaataaaatggcgttcgaaggcgttttgcccttcaatcgacaaagcattttgatagaaggcgcggttagcatcgaagtagttaaatagttgcgccaacacctgtgtccaatgaatatagctgagatgctcgtcgatgtagacaccgatttcttgatcgtaaatccaatctaataacgcatatttatcagggaaataatcataaaaggtttggcgtcgaatgccagttttattcatgatggtggtgacgctaattttattaaaaggttgttcaaccattaattgtttaaaagccgtggcaatcgtttgttgggttgtctgagtcatcagggcatctccttttgaacgttattaagtaaaaagtcgtcattcaagctagtgaatgacgacttttgtattatatggaattgcggtatagaaccattgggcatcagctactgataaacggatacagccgtgtgaattagcttttttgcctaattgctctgcttcttctggaatgaaattgccagcttcatctgtgggcacactgtgaaaaagataaataccatgatctaggaaagagcgccaatatttggcaccttccccggaatttgcattgaaaaatgagtcgccgtgttcagcttcgatatagaaggtaccagttggtgtgggtgactcaggggaaccggtcgaagcatgcattgtgtacaaaagatcattgccatttttaaggtagacacgttgctgtgcaattgaaacgtcgacccataaatcgggttgttcgtctaaattaggatatggtttgttttcggaaggcgcacgccagtcaattggtgtcgggtgagccgctttttttgattttatcgattgttgcctcgcatgcgattgtgatttggtagaggacgtgactgcggcttggtgtgtttgatgccgagctgaggtagaccaatacccaccaactagtaaggcaatggcaacaatgatgctgccgagcattaatcgaatgttgtttgtcagttttggcatggccgacttccttccgcaataaagtacctccagtatacgggataaagcgctaaacttcaatacggattagcttgctctagcctagtatttaagctaaaatagaccagtaatcacgaatgacgaggagcttatgatggttaataaaaatgcaattattttagcagcgggtaaaggtactcgcatgaagtcaaaattatataaagtattacatgaggtttgtggtcgaccaatggtagatcatgttttaacccaagttgaaagaacgcacccaaccaatgtggtcacaattgttgggcacggcgctgaaaaggtgaaagattatctcggcgaccggtcacaatatgcattacaagctgaacaattagggactggccatgcggttttacaagctgaagctttactgaaagatgaagatggcattacgattgtggtcagtggcgatacgccacttttaaccgctgaaacctttgaaaaattatttgcataccaccatgataaaggcgcaaaggcaacgattttaacagcaacggccccagacccaacaggttacggccggattatccggaatgatatcgggattgtcgaaaaaatcgttgaacaaaaagatactaatgataaagaagcggctgttaatgaaattaatacgggcgtttattgctttgacaacaagaccttattccaagctttgcacgaagtgacgaatgagaacgcacaaggtgaatactacttaacggatgtggttgaaatcttgaagaaaaaaggcgaaattgtcgctgcttacagaatgccaaactttgaagaatcaatgggtgttaatgatcgagttgctcttgctgcagcaacaaaagtgatgcgtaaacgcatcaatacagaacacatgcgtaatggtgtgacattaattgatccagaaaatacttatatcgaagtgggcgttcagattggtaatgatacaattgttgaacctaacgtcgtcttaaaagggaacacaacaattggttcagattgtttcgttggtgctggctcaactattattgattcaacaattgaagacaacattcaaatcacaagttcaacgattgaatcagctatcatgcacacggggtcaaacattgggcctaacagtcatttacgcccaaacgctgaaattggcgaagacgtccatgttgggaacttctgtgaagtgaagaatgctaaaattggcgatcgcacgaagattggccatttaagttatgttggcgatgccacattaggcactgatattaatgttggctgtggcgtagtctttgttaactatgatggcgtggctaaacaccacgcaaatgttggcagccatgtcttcatcggtagcaactcaaacattgtcgcaccggttgaaattgcagatcacaccttcattgcagctggctcaaccatcacggatgatgtcccagaaaaggcaatggccatcgcccgtgcccgtcaaacaaacaaagaaaactactgggcaaaactaccagtagcaaatgacgaagaatggcaatagagtgctggctgtggcagttagtaattgagcattaatacgatgttagattaagcggaaattacggtgacaagaagcacgttttggattaaagtgtgtttgtgacgattagcttagtgttgtaaagcacatcttaaaataaaaatcgtccgtaatcttatttttgagattacggacgatttttttgatacttgtagttattttaaagttgagaaataatcgcgtattaagaaggcgattagaaaagcgggccaaatccaaattgaaccacttgaaaataagattagaagaagtatgataagactcccaacagcggtggttgcccagcccatttttgtaatgcgataatttttaggattatagttcgggtgactggggtagaaaaaatgatactgataaatcaaaacggcaacgaatagaataagaccaagaataaaatagggcatgctgaggtgaaataagcgatcggaagtaataataattaccagaattaaaagatagagattattaaaaatagtgtatttaaggcgggtcatagtaacctcctttttcaattagtgtaccttgtcttgcgctaaatgacaatttaatccataatccaaaataaacaagcatttttggggatataatgggatactaaacgggaggttcgatggtaatcgctattaactttttctttttctctcacgtttctaatgaacagcgcttactttacaacatttgtgaactttttaagttttaatcttgatttccggggtgaaaatgcctaaactttaaataggtactaacataaatttttggaggctgacatgtctgaacaatatttcgaccctaagttgaaaatctttgctttgaactctaataagcccttagctgagaaaatcgcggctgaagttggggttcctttaggaaaatcttctgttaaacgttttagtgatggtgaaatccagattaatattgaagaaagtattcgtggcgacgaaattttcattattcaatcaacatctgcaccagttaatgataacttgatggaaatcatgattatgattgatgcattgcgtcgtgcatctgctaaaacaatcaatgttgtgttaccttattatggttacgcacgtcaagatcgtaaggctcgctcacgtgaaccgattaccgctaaattagtggctaatatgttaacgatggcaggggctaaccgaattttagcattagacttacatgccgtacaaatccaagggttcttcgatattccagtggatcacttgatgggtgctcctttattggctgattatttcttgagcaatgacttggctgaaaatgctgttgttgtttcacccgatcacggtggggttacacgtgctcgtaaattagctgatttcttaaagacaccaatcgcaattatcgacaaacgtcgcccaagaccgaatgtttctgaagtgatgaatattatcgggaatgttaacggtaaacgcgcaatcatcattgatgatatgattgatactgccggcacaattacgttagctgcgcaagcattgaaagatgctggtgcaacagaagtattcgcatgttgtacacatccagtattgtctggcccagctattcaacgaatcgaagattcagtgattaagcaaatgattgttacagattcaattaaccttccaaaagaaaaattaatcgataaaatggtacaagtttctgtcgggccacttattggggacgccatcaaacgaatccatgaaaacaaaccagtcagtccattatttgaaaacagatttaaaagataagcgtgctaactcgaatgggttagctttgagaaagcacatttcaataagctaacaattaaaaacgcctgaacaatttgttcaggcgttttttgtgactttatttttctttgttagctaataaatcgcgaatttcttttaagtaaacttcttctttcgtttcgactacttgtgcttcttcttcttcggtcttcttgcccatgtcacgaagcttgttgaatcctttgacgattaagaagacaacaaatgcgatgattaagaagttaatcacatcgtttaggaagttcccgattttgaaaacagccttggtgcctggaatggtaagcgcaataccggatagatcaacttgtccaacgaataatgaaatgattggattgattaagttctttgttaatgagtccacgatgctttttaaagcagcccccaaaataaccccgacagccatatctagcacattaccacgcataataaattctttaaattctttaatcatgaaaacgacctccattaatattattaattattgctacaaaaagtataccgtatttccagagcctataaaataaaaatgctgtactagttacataattaaccaataaatttgttattttcatgaaaaatcgttaagatagtcacaggaattaaataacagaaattagagatagaggaaccttagatgaattggattgtacaattgtatcaaccattctttgaactgagtaattggcaaactgtcattacgtcgtccgaagattggcttttaattttaacgttagtgattatggaatgcttactctcagtagacaatgctgttgtattagcggcacagacacaaacattacctacaaaaattgagcaagaaaagtcattggtgtatggcttatggggcgcttatgttttccgcttcattattattggtgtcggcacctatttaattcatttgtgggaaattaaagttgccggttcattgtatttaatttacttagtcattgcttatttcagaaagagtgggcatccgaagcaggctaaaacaccggaggcgggttctaaaatcagtagtccgcatcggttctggcgcacagttgcttcgattgaattgatggacattgttttttcaattgattccgtattagcgtctttagcgatttctagtaatccggtgattgttttaattgggggaatgattgggattatctgcatgcgggggattgcccaactcatcgcccaattgatgaagaaaattccggaattaaatccgatggcttacatcttaattctcttcatcgcgattaaattattcttgtcgattccagccattgactatgaaattcctaacctagtgtttgctggaattgtgtttggcgttattctactgacgctcattattcattatgtccgtgcagcacgggctaaataggcatcataaaaaagccgttgtggacaaattgtccacttggctactaagtgggtaaaaaaaaccattaaccaaccattagcaccctaaaaaagcctaggtcagacaaataatagttgtctgacctaggcttttaaagtgataatttaatcgtttgcgccacagtcttagaaatcccgagtgcttcgagttccgccactgaagcttctttgatatgtttcatcgaaccaaaattcttcaagagttttgtccgcgtcttaggaccaacgcccttaatatcatcgagtttagaactcaaggagttctttccccgcaattggcgatggaaactgatggcaaaacgatggacttcctcttgaatccgcgttagtaagtagaacccttggctctttggatccaactgaatggtttgatcaacttccccatataacaacgaggcggttttgtgatgattatccttgaccatccctgcaacgggaattgatagccctaattcgttctctaagacgtctttagccgcattgagctccacaattccaccatccattaaaatcaaatcaggcagtggtttatcctctttgagcaatcgcgaataccgccggaaaatgacttcccgcgtattggcatcttcgttggcgcctgcgcgatctgtcgtttgcgttaacttatacttgcgatagagtgtcttctcggcacggccatcaacaaacgtgaccatcgccgagacaggatcagtcccttgaatatgtgaatggtcaaacgcttcaatcacgtggccatgtggtaagccaagcgcgtccataatctcatcttgcgccccaacggtcttgcggttgtcgagttccaataaacggaacttctcttccaacacaagccgactatttttctgcgccatttccatcaacgcttttttctcaccacgttgcggcgtgcgaatcggcacattcaaaatttcggtgaggactttcttttcgaccccttctggaaccagaatttcgcggggtaacacattattcttgcggttgtaccattgtaaaataaaggttgccaattcttcttcaggtgtgctgacacacgggaagagccgcttttcacgccgaatcaaccgtgcttggcggatgaagaagatttgaatcgataaccagcccttatccaaataaaaggcaaataaatcgcgcggggtattatcgttagaaataattttctgcttttcaacggtggcttcaatgtagtggagttgatcgcgcaattctgcggcgcgttcaaactgcatctcttcagcagccgtagtcatcttggccgtcagttcttttttaaccggatcaacttgcccattcaagaaacgtttaatctccttgatttgggccgcatagacactctcaggcacttctttgaaacacgcgcccaaacattgacccatatgataatacaaacagggccgcccttgatgtccctgacagcgtcgtaaaggataaacccgttgtaagaatcgcaatgtttcttgggcggcatacacgtccggataagggccaaaataaaagccgccatcttttttgacatcccccgtgatcagtaggcgcggatcgcgttcattcgtaattttaatgtaggggtagcctgtgccccgcttaagtttaatattaaagtaaggttggtgtttctggattaacgtaatttccaacaaaaaggcctctttatttgtcgatgtgatgattgtttcaaaatcgacaatttcagagaccaatttggccgtttttccttcgtgactactcttgaaatacgagcgcacgcggtttttaagattttttgctttacccacatagataatcttggcattgatatccttcatgatataacaaccaggtaatgcgggtaagagtgctaatttatgttcaatgtgttcgcttgccaaaaacaccactcctttaattcaaaacaagtgttcgtctttctattttacgtgtttttggctaaattgcaactattgtgctaggaccttggctaaaaattgttgcgtccgttcttcttgcggatggtcaaaaatggcttcggggtcccctttttcgacaatttgactatctgccatgaaccagacttcatccgccacttcgcgcgcaaaccccatttcgtgggtgacaacaaccattgtcatcccttcttgtgctaagtcttgcatgaccttgaggacttcgccgaccatttctggatcgagcgcagatgtcggttcatcaaataacaatacgtcgggtgacatcgctaatgcccgcgcaattgcaatccgttgtttctgcccaccagagagttgatcactataagcatccgccttatccgctaaaccaacgcgttcaagcaacgcttttgctttagccgttgtttcggccgctgattctttcttcactttttgtggcgccaacattaagttatcgaggacagttaaattggggaaaaggttaaagttttggaaaaccatccccatctttgtccgaatctgatcaagctgtttttcagataacgtcatcaaatcggtgccttcaaacagaatttggccactcgttgggtcctctaaacggttcaagcaccgcaataacgtactcttacccccaccggaagggccgatgacaacaatcacttgaccagcttggacttcaccactaacaccatttaacacgaggttgtccccatattttttaaccaattgattaatcttaagcatgttgcatcttcctttccacatagttcaaaagtttcgagagactaaaggtcatgataaagtagatcaccatcgcaacaaaaatcggtgcaacgcctttataagttgctgattgaaccactttgagttgataaattaaatcagtgaccccgataatggaaacgattgaactttccttgattaaagaaatgaattcgttccctaaagcaggccagatattcttcagggcttgtggtaaaacaatgtaacgcattgtatcgcgttgtgacaagcctaaacttcttgaagcttcagtttgcccagcatcgatcgcattgatccctgaacggataatttcagcaacatacgccgcactatttaaggaaacggcaattacccctgccaaaagtgctggaatgttgacccataagccaatcccgaagtagacaaacatgatttgaatcatcaacggtgtgccccgaacaaattcgatatacatgactgccagcgcacgcaccaacttattcttggccaaacgcccaaaggctaggaggaccccaattaaaatcccaattgcaattgaaacaatcgtaatgaataatgtgtagccaatccctttagcgaagtatgaccaatagtgccacatgctagtgttgtgcgtattgaccttcatgagttggcccgcgttctttaagtattgcggaattaatttttgctttttaatttgcccgatactcttattagcagcagcgactaaggttggcgaatcctttggaaaggcaatcgctgatccttgcatgtctgcgcctaaatcaaatttcccattaatttgaacgagttctggatcattacttgcataggcggttgcgactggttcttccgccacaatcccgtcgattttatgactctttaatgcaaggacgagatctgggactttggccaagcccgtaatctgcgcatctttaatttgctttttagcgagtgtttgttggagactccccgtttggacccccacttttttcccgttaaaactatttttggagtggtaaatcttcgcatcagctttattgactaagattgattgaccaccgagataataaacatcagaaaaatcaacactcttgcttcgttcatccgttggtgacatcgccgaaataaccatatcgactttaccggtttccaaaccaaccaataacgcatcaaagtccatcgacttcaccactaacttaacgcctaaatcatcagctagcttctgtgcgacttgaatatccataccgacaatcttgttcttaccgtttttattcactaaaaattcataaggtgcataatcggggctggttcccaaaaccaacgtttttttagcttgcacttggctaaccgtctgtccagctgccaaaacgggctgctgctgaatcatgaaaaacgttaacattaccatgaatggtaacccaacaaaagtgagtaattttttaatcgtcatattatctcctcctctgattaggactatcatacaaccaattaaataattatgcaatatttatttataaaaagtgaatcattggcgaaaccgttattatctggtatgatagatgcaaattagaaaagagggattacgatgggcttaaaagtcactaacaagaccgatttaaccggtttattcgataaattcgcatcactaccagaagaacgccaaaaagttgaagcacaagttgaagaaacagctgataaattaaaaaaggtagatgcagaacaaaaagaaaagcattaaacaaagacagcaaaaaaggcggtaagacaaattcatttttgtcttaccgcctttttgctggtttaaacgtgcgtcatttgcaatcgcctttcggttaacgcgattgtacgctttattctgcgtgtctttctgggtagcgttgttttaattgttcaatgttttcgcgcgcgactttatcaaagtcgaggttattccattccgcaatttgtgataaataccaaagcacatcgccgattttcttagacatcattttttcatctagttcgtggccttggaacgcatattttttaacgatatcaaccacttcaccactttcacttgctaagcccaaagctaagttagttaacacttgttcgttaccatataacgttcggttggctaacttttgatagtcattaaattccattatgcttgtccccctattgcacattgcttttcaatccattcccaaactgtctctttaccagcaccagtcagtgcgctaaagcagacaaattgatcgactggattaaaatcaagcgcttctttgatgattttttcttgacgattccatttccccgttgagatcttatccatcttagtagcaaccactaaaacagggatatcataatacttcgcaaaaacgtacatcgcgatatcatcatcggttggttcgtgacggccgtcaattaatgaaataagcccctttagatttgagcggctggttaaataagcctcgataatttgcccaaacttctcacgttgcttctttgaaactttggcatacccataaccagggacatcgacaaagtaaagttcgttttcaacgcggtaaaagtttaaagtctgtgtcttacctggcttgctagatgtccgggcataactcttacgattgattaatttattaatcaatgaagacttaccgacattcgagcgaccagataacgcaatttcaggtaattgatcagttgggtactgcgaagcagctaccgcactcatcaccatttcaacatcatgtacttccataataacctccgattatttccttcgaatgttagtttagcataaataaataattattgcgccgttgacatctctctagtttcatggttaacatatcttcttaaccccgttaaatcgcgtcattgtaccgtttcaaaagtcccttaatgcaaaaaaactgccgcgacaaaatctaatttgtcccggcagtcttttaatttttatgacgcttcttgtccgtcagctaaaaagagttgtgggttggctgtgccatccaccgcttctttcgttacaacaactttagccacgtcttcacgacttggaatatcaaacatcatatccatcatgacttcttcaatgatcgaacgtaaaccacgggcccccgtgtttcgttcaatcgctagatgtgcaatcgcatggagtgcttctggtgtaaattctaattcaacattatccaaggccatcaacttgctgtattgcttaacgagcgcgttcttaggttcagttaaaatatgcaccaaatcatcttcagtcagtttttccaatgcagcggtaatcggaatccgaccaatgaattcaggaataatcccaaatttcattaaatcttccgttacaatttgttgcattaagctttgatcttcattggtagtttgaccattcttgcttccaaaaccaattgtcttttcacctaagcggtttttaacaatcgtttcgatgccgtcaaaggcgccaccaatgatgaataaaatattggtcgtatcaatttggattaactcttgttgtggatgcttgcgaccgccttgaggtggcacactagcaatcgttccttcaagaatcttcaagagggcttgttggaccccttcaccagaaacatcacgcgtgatcgagacgttttcactcttcttggcaatcttgtcgatttcatcgatgtaaatgatcccgcgttcagcacgatcaacatcgaagtctgcattttgcaacagcttcaagaggatattttcaacatcttcacccacgtaacccgcttcagttaaagtcgtggcatctgcaatcgcaaatggcacatttaaaatccgcgctaaggtttgcgcaaggaatgtcttcccggaaccagttggtccaattaacgcaatattactcttctgtaattcagtatcgccttcttcggccactgacatttggttgacccgcttgtaatggttgtagactgcgacagataaagcttttttcgcttctgtttgaccaatcacataatcatttaaaatggctaaaatttcttttggctttggcacttctagtaaatcactgaaggcctcatctttaaactcttcatcaataatctctttgcaaaggtcgatacattcgttacagatataaacaccagggccagccacgatctttttcacttgatcttgcgacttcccacaaaacgaacacgttacgggtccgttagttgtttctgtatcatctagcatactgggattctcccctttctcgatatacgcttaccgctgtgagtcgttaaaatacacccctacaacgtaattcagactatagcataactatggtctagaataaagtaaagttactcgcacaccgtcaatgacacaaaagcgggtccaaagtaaacaccttgaacccgctttttagcatcatttaaagcttggattgatcagacgaccttatttatcgtctttcacttctacagctgaatcagcaatgatttcgattgctttcttaacaccgatatcatgttttaacatgtcatctgataagacgctacgaacagcagcttcttccatattgtattgttcagctaaactcttaagttctgcagcaacttcttcgtctgttgcttcgatgttttcagcttccacaacggcttcaagtacaagacttgtcttaacgcgtttgtcagcatcaccagcgaattgtttcttcaaatcatcttcagttgtaccagtgatttgatagtacatttccgggttgataccttgttgttgcatgttacctaagtattgttgtaattgactgttgatttcttcgtcaatcattgcttgaggtaattcagcgattgttgcattttcagttgctttagcaacggctgtatcttggatagcagcatctgcagcatcatttttttgttgttttaattcttcacgaattttttcttttaattcgtctaatgtatcaacactttcgtcgatatctttagcaaattcgtcatctaattcaggtaattccttagctttcacttcatggattgttaccttgaagatggcttctttaccagctaattcttctgcttggtaatcttcagggaaggttactttaacatcaacgttgtcgtctgctttgtgaccgactaattgatcttcgaaacctggaatgaatgaatttgagccaagttctaatgaatagttgtctgcttgaccaccatcaaaaggtacgccatctacagaaccagcataatcgatgacaacagtatcgcccttttcagcagcggcgtcttcttttaataccaattcagcttgacgttcgcgacggttttcaatttcttgatcaacgtctttgattgtaatgcgacggctttgttttggtacttctaagcctttatagtcgcctaaagttacttctggtttaacggtgacttgagcagtaatcacccaaggttcgcctttttccattttttcaacattaatttgtggttgatcaactggttgaatagcagcttctttaacagcagcatcataagcttctggtaagattgcatttaaagcatcttcataaagggcttcttcaccatacatcttgttaaagatttggcgaggcattttacctttacggaaacctggtgtgttgatatttttacgtacacgtttgaacgcaacgtccaaaccttcactaattttatttaaatcaatttcaaaggttagttcaccatcattggtgccctttttttcccattttgctgacataatttccctccgacagttatattcacaatctatcaattgcatacttaatcagcataaactatttaacctaaattgtaaatatttattggtctaaaaagcgataaaatccgatattttagtcgtttcaggccaacttttatcgaatttaatgcacaaaaaaactcgcagtttttacactacgagtttttcgattcaactaggttgaatattagtcgataatttcactaacgacaccggcaccaacagtacggccaccttcacgaacagtgaacttaagacctttttcaatagcaactggtgagattaattcaacagtaaatgttacgttatcaccaggcataaccatttctacaccttctggtaattcgataacacctgtaacatcagttgtatggaagaagaattgaggacgatagtttgagaagaatggtgtatgacgaccaccttcatccttgctcaagatataaacttcacccttgaagttcttgtgagtttggattgaacctggtttagctaaaacttggccacgttcgatgctatcgcggtcgataccacgtaataaagcaccaacgttatcgccggcttgaccttgatccaatgtcttacggaacatttccaaaccagtaacagttgtcttagcaacttcgtctttcaaaccaacgatttcaacttcgtcaccgacagtaacttggccacgatcgatacgacctgaagcaacagtaccacgaccagtgatcgtaaatacgtcttcaacaggcatcaagaatggtttgtctgtgtcacgttctggagttgggatatattcgtcaacagtagccattaattcttcaacagctttaacgtcgtcagcattgccattcaatgcaccaagtgctgaaccgcggataactggaatatcgtcaccagggaaatcgtattctgataataattcacgaacttccatttcaactaagtccgttaattcgtcatcatcaactaaatcagtcttgtttaagaagacgatgatgtagtcaacaccaacttggtgagcaagtaagatatgttcacgtgtttgtggcatagggccatcagttgcggcaacaactaagatagcaccgtccatttgagcagcaccagtgatcatgttcttaacgtaatcagcatgtcctggggcgtcaatatgtgcataatgacggttttctgtttcgtattcaacgtgggctgtattgatagtgataccacgttctctttcttctggagcagcatcgatgtttgcatagtcttgagcttcagccaagcctttgtctgccaacatctttgtgattgctgctgttaaagttgttttcccatgatcaacatgtccgatagtaccgatgttaacgtggggttttgttctttcgtaatgtgctttttctgccattaaaacgaacctcctgtattttcgcaagaaaaaatcagtgtttagatttactaaactgataatcctttacataatattataatacttcaagcgctaaaatcaaagtgtttttttacacttgaagaattcaaaaatgattatatctgctatgagcgcgtttgtaaacacttaatgctcaaaaaaagtcagttttgaaacgatatttaggtgttttctactctaaaaatcaagttttcctgtcatttcttgcaactttttcacccagtcctgtatcttttctgaaataaccactgacgcggtataatccggacccagtaactgtttgagccatgcttgcgcccactccgtaggattatacatgatttcagcttcaaaaggatataaatatgcaaatcccatctcaacatccgccatcacttgtgctaacaaagtcggatcttcagtggctaactgctcatttaacgccgctaacaccgcattaaacgtcgggctctcctccatcagttggatatcggcaggtacaaaagtttttgtctgttcaaaccattgcatcgtgactaattgttcaatattcagctggacgagcgtttcaatgacagtcgtcttcacgaaagcatgactgtaaggattcgttaaaatgggcgcaatactggtgacataaacattacgtggtaattgttcagcctgcgtcaacattgctagctgttcagctaatgggtgcgcagtgaggttatagaggccctctgcttgcttttgaatcgctgcttggtgattcgcttggtattctaattccgcagccgtaatcatcattctaagcgtcttaatgacttgcggggcaatcgtcgcatggcgtaatgcctcccacacttgatttgccgtaataaaacggtggttattcagtaataatgcaagataaaaccgcactaaatctgtttgttgtaagtagtccgcttgttgttcttcgacgattgtcaatgctgtttgcggatcaccagcttcaatcagcgcactggaccacaataaattcgccgacaacgtctgttctagttgatacgcagcttcaaaatggtcgcatgcttgctgccaattttgttgatttaacgctactttccccatccgtatcagccgatcatactgatctggaaattgcgtaatgtcacccattcaatcacttccttttgacaattaataaaacaatagcgcctagaatcaactgacctgatccagacgctattgtttctaaatgttattcagcggctttttcagcctttggtttattatcttttctttgacgacgatgattttgattaatttccataatcactggtagaatcactggccgacgtttcgtttgttcatacaagtaatgacttaagttttcccggacatcttgtttcaaatgactccagtcaaattctttgttgtccagattattttgcaccgcatttttgataatttcggcactctcagccattaaatctttgctagtcttcacgtaaacaaaaccacgtgcggtgactttcggttccgcgataatcttcttattcttgcggtcaatcgtaacaacagcgataaaaatcccgtcttctgataataatttccgatcgcgtaaaacgatattcccgatatcgccgacaccgctaccgtcaatcatgacgtcagttgcgtcaacttgtccgccaacatgcatcttccctttttcgtaagcgacaatatcgcctttaccaacgatgaaaatatctttgtaatccattcctgtttcatgagcaatatcagcgtgtgctgctagttgccggtattcgccttgaacaggcattaagaattttggttgcattaaattcaacattaattgcaagtcattcttattggcatggcctgaagcatgtaaatcatcgccaaccgccttaacttcgccacccgcacgataaatcatatctttggtcttcgctaaaatcgtttccatcgcgtgtgaaggagatgtcgttaaataaaccaagtcgccttcttcgatgtgaattaaacgatgatgactagttgccatcttttgaagcgccttgattggttcgcccatccgacctgtttctaagatcactgtttgttctggtgcaagtgtgcttaaatctttaggttggaccaagatatcgtcatctggcaaaataatcatcgataatttcattgctgtccggacgattttttctaaatcacgacccgttaaaaccactttacggcctgttttataagccgcatcaatgacttgttgaatccgcataatatttgaagccactgaagccacaatgatccgacccgtttgatacttgaacgtttctaagatggattcagcaatatcgcgttcgttagccgttgcaaatggtgattccgcattagcagaatcactcaagagtgctaaaacaccttgtttgccaatttcagctaagcgtgcataatccgtttgatacattggcattgctgattgatcaaacttaaagtccccagtataaacgacttgtccttcatccgtcttaacgacaatccctaatgaacctggaattgtatgcgttgtcttgaagaatgaaacggttgcgcgttcaaaatcgattgctgtattcgcatcgatgacgtggaagttttggaacttacgtaattttggttcactgctaaccgtaattttagctaaagcaatcgttaattcagacccaaagactggtacatcatgttcctttaagaaataaggaagcgctccaatcgcatcagcatgaccatgtgttaggaaaatcccagcaacacggtctgcattttcttctaaataggtcatatcaggaataacgatatcgatccccaataattcagtttctggatatttcaacccacaatctaatacataaatttcgtcgtccacttcaacaatgttcaaattcttaccgttttcacgaacaccgccaagtggcataatcttaatgttactcattctttcacctctagcacttgaggaatttattccccaaactattttgtttgttttagtcgttcattcgtttaaaactcatccgccttaaagtctaactcatattttatcacaatttaaacaaactaacagcttttgattactaaaagccttttgagcacaaaaaaagcgggtccgcataacggacccgctttttgaaaatgaattaacgacgtaagccaaggctcttgattaattcacggtaacgttgaacatcgctttcacgtaggtaacgtaataagttacgacggtgaccgatcttcttcatttgaccaacatatgaatggtgatctttcttgtgaacagataaatgttcgtttaatgagttgatttctgcagtcaatacagcgatttgtacttctgctgaacctgtgtcgccttcgtgacgagcaaattggttaatgatttcgttctttttttcttgtgaaatagccatgctaatttccacccttctggtataatagcctagaacaacgtaaagcgtcgggtgaacgtcgctaaacagagtagtaggcctgtgcaataagcacttttcaagtttactaaatattagcgtcaaaagcaaggcacagtttcaaactatttaagcagtcaagttgaaatactttacaagtttttattgcaatcactctcactattttggtataataacgactgttgaaattaaaaatcttttttataaagatagtgaaacccatcggaggtgaacaacatgccacaaattaaatctgctatgaaacgtgtgaaaacaattgaaaaagctaaccaacgtaacgcttctcaattaagcacaatgcgttcagcaatcaaaaagttcaaagctgctaaaacagcaggcaacgaagaagctgcagacctattgaaagctgctacacgcgcaatcgatatggcctcaacaaaaggcttaatccatgccaacaaagctggccgtgacaagtcacgcttaaacaaaatgatggctaaataatttaaccacaaaaaagcccccacaaccatttggtttgtgggggcttttttgctttaagcaacatcatctgtcgcaaattgtaacataaacagttcaaacaataaggttgcttcaccttgcccagtctttattttttcttcaatgccctctaaacctagataggcttgggcaagcgtcgccttagaaaagtgccgaatttgttgcaatgctaatttgatgcggtatgggtgaatttttaagacgctcgccaaattaccttggctataccctttttcaaaaagaattttcacttggagtaacaagcgaaattggcccaacaagatggcgttaattttcagcggttcttctttttgtagcaataaatcgtgatacatctctaaaaccggaccgacctttttttgtaaaactaacggcaccaattcaaaaacattatcttcaatactacttgccactaatgcactaacggccgtttcagtaatcacccggctttgttgcgcgtaaagcagtaatttgggtaactcagccataatctgactgtaatcaccattagtcttgcttaacaataacgtcattgccgctggttcaatcgtgacttgttcactttgcagttgcgctgtcactaactgctggacctggcgctcattaatcttttgaacgtcaatgacagttgccatcttcttcagttgtttaacaatcttcttgcgttcatccaacttcgcgtatggcgcgaagataacgagtgccgttgtcggttgtggctgttctaaataagcttggaatccttttaaatcatgatcaagtttagttttaactttttcacctgttaagaagaatggattctgcataaaaacaattcgtcgctcaccgaaaaagggggccgattccgcatcttctaatgcccgcgccacctccgtctgggcgagatcataactcgcaaagttcatcgtcatttcttctgtcgaaagcgttgctttaaataacgctctaacctcttcaatcagcgctgactcttgtcctaatacgagatacaccggtgcaaacgttcctcgattcagtgctgtttttagttgttctgtcttcatttagtcacaatcctttagtgttgttttaatcattggcacttggccaaaaccatagcgccattccagcatcccacagtcagccgtattccaaaatgggacgttcgcacgttttaaagtctgcaacgttgcggcatgtggatgaccataacgattatggcgtcccgcagaaatcaacgccccttttacctgccacgtcgcaattgactggggatcactcgccgtttgactgccatggtgacccacctttaggtaatcaacgcgtaattgtgggtagcgatcaacgattgccacttcacccgctttttctaaatcaccagtaaataaccaactcgcaccaccaatttgcgtttgcaaaacgagtgagtcagcattcccgcctggtccggccaccactggcgctaacacattgatttgttggtgaccaatcataaaatgttggtccgccaaataaggctcaattgcaacttttgtaagatgcggccgcacttgccgttgaaactgccggttttgcggtaagcccgcagcacaaatcaaccgtttaactcggatatgttgcataatttcatttaagtcccctatatgatcagcatcctgatgcgataatgcgattgcctctaaatgatcaatgccacagctgtagaggtaattaactgttactttttccgcccgactcacaatttgccgccgttgccacttttcttgcggtaaagctagtcggccgccggtgtcaattaacaggttatgtcgattgaagggttgttgaatcaacaggctatcgccttgcccgatatcaaacataatcacgcggccaaccggattaaagtggataccaataaaactaatgacatacaggctgataacagccccccagccccactttactcgccgaccagtacttgccatcaaccatagtgtgcctatcacaattaaaaagagtggtattagctggattttaccgaaagtaattgtcgcatatgggaacgttgcaatccaagctaatcctttatacagcgtcgttagcaggccttcttctaaccaaactatcatatgactaacaggccataagcaaatcgctaccataatcaaacccaacatgactggtaagaaaatcggcgcgacaatcccattaatcaaaatcgtcaagatatgccaacgataattaaaccgcaagcacaccggtaaacttaacaagcctagccaaaatgccgttgtaaaagtaccatggcgccgctgataaatcaatccaaaagccatcagatagctcagcaatccccccatactgattaataaatacggctgccataaaagattgaccagcaatacccaactccaactatctaaacgcgattgctgaaaatgacttacttcgcagattaatcgtagtaagatcagcccgatagcgcgtgtaatactcgtgcctccccccacaaacaacgcataaaggggtagcaaacaaaacaagctaacattcacccattcacgcgggactcgacacagcgttgccaatcgacgaatgattgtcacaaagtagaatacatgcaatccggataaactcaataaatgaataatccccaattgacctaacacattctggtaggccaggccatctgactctcgaacaccacataacaacgcctctgcatgaaaactcaacgctggtggcaattgtcggagataaatcagcccctgttggcgccgttggtggaaccaatctagccaaccttgtggtggaatgcgtctaaagaccgttccgtcaattatatttgcttgataaaaacaatgcttttgctgccccataaagcgcgcatagtcgaactcattccggttagtagcaccttggatacgctctaattcaatatcacccgctaataataacggctgattcgtcgtttgccaacggcgtttttccgctgaactctggcagcgatagtagcaaacaacacgttggtcatcattctgcccctgcgccattaattgaatctgatcgccagccactttgatcgtatcgggttgaatcttatatacttgattatttggtctaaccggctgttcgtaggtgcgccgtgccagccaaaaatggcaaccgcctaaacacagtaccagtccactgaccattaacacagctggttggcgtaagcaccacagtcgcagtagacacactatcaaaagacagctaaaaaaaagtggtgcttgtcctagtaataacgcatttaaacttgctaaacaaataactggataaacccagttattcttaatcactcagcagtttgttcattctccaaaaagttaacgagggtgttggcgtcattcgccgttaaatcgacttggtccaattcaataccagatttttcaatcaattcatacgcatattcgtcgttatgataatccttttgataatggattttactgatcccagcttgaataattaatttagtacactgaagacatggaaaatgtgtgacataaatttcggccccttccgtctgcacaccaaacttagcgcattgagtcaaggcgttcatctcggcatgaattgttcgtaaacaatgcccgtcccgtaataaacagccaacatcgatacagtgactttcatgtgccaccgaaccgttgtagcctcccgcaataattcgccgattacgaaccaccaacgcacccacaaacaatcttggacaggtgctacgcatcgacaacaagaccgattgaagcataaaatattgattccacggcattctcttttctgacacacgaattccccctttaaagttaatagttttagtatagcaaaaaaataccattcacaaactaattaacacaaatttgtggccgtaattgttcaaacgttttcggcccaattcccccaactttttgaagatcttcgatttgtttaaactgcccttgctcatcccgatatgcaattatttgttcagcttttttaggaccgatgccatttagcgtttgcaattgtgtcgcatccgcttggtttaggttgattttagcatcagttgatatcggactggctcccgcttgattgtcagtcgcagcctgtggctcgtctgccgctttcactaattcttcggcttgcaccgcttctcccttagttggcacatagataataagttggtcactcaatgtttgcgctaagttcaactgactcgtatccgctgcttcggtcacatcccccgcttgtttcagcacctcaaataaacgcgtctttgcaacacaaatcggataaatccctggatgtgccacagcgcctttgatatcgacaaacccaccttttgagacgcttttcttctgtttgacgggttttgccttcacttttcgcttagttgattgcgccatcaattgttgattggttgatagaaaacgttgttgccgactatgctgccaaaacacaccaccactaagtaaaattatcaccaaacaaggtacccaccagaatcgacgataccgttgccaatagtcgcgccacatttttcgccacctccttattcctaattaccccaaaacgcaaaaaaaatttgccgattctttcgaaccgacaaattttttaatgtttggctaaataatccaatgcgtcgtccaagtttttgacaggaacgattttcatcttagtaccaatttttttagcggctgctttggcaatcgcataattattttgataatggggttctacctttagtatggcttttgtcacgggatcatcaggtgcgaaaaagactttggcgccttcttgactcgcaatcagtaccttcttatcaattccgccgattggtcccactgtcccatcaggatccattgtccccgttccagaaatcttgcgaccacccgttaagttttgtttcgttaattggttataaatctgtaacgtaaacatcaagccagcagaaggaccaccaatttcacccgcatcaatcttaaccggcacttttgtcacaatttttgagtgatctgtcagcgtaattcccaaaccagcgtagcgcgatttaggtaatttaatcaatttacgggtcgcagtcttacgctggccattatgttcatagctaatcgtgactttttgattcactttaagcccttgaacatacttgacgaacttatttgcactcttaaattgatgctgatcaattgccgtaattgtgtcaccaatagccagatcttttttaaaagctgaattatctaaaattgacatcacatagacacccagatattgagtgtggtattcctgatgtgccttttgataagccgcctcaatcgcaaaattaatcgagctttccatgtagtatttttgaatctgatcatacgcttcagtatcatcgtcacccattagttcatcacgactaataatctccgtaaaaggttgtgttttagacagtaatagctgtaaccccgtcactggtccttgaatcccgacggttgttaacataaagtggcccttatgttgatctcgttgaccgttaactttaacaaactggttggtattttcggccgaaccgaccccttcgacgtaataatgcgttgggataaagcaaaaagcaaacacgacgatcaagccaacaatccataggagatgcttcaatagacgtttattcttattcatattaatcactttcaggtcctaatttttgtgcaagcgcagacgcgacaaccggcggcaccaattgttcaacctggccaccaaacgttgcaatttccttcaccatacttgatgagataaaagcaaattcttgctttgctaataataacaccgtttctaaatcagcatcttgtgtctgattcaacgccgcaatatcacgttcatactcaaaatcattggcattccgaataccacgaatcaaatatcgcgcaccgacttctttagcaaaggttgccgtcaacgtcttcgattgtgcgattaccttaacgttatccaagtgttgcgtcgccgcttcaatcagttcaaccttagtggttgcgtcaaataacggttgtttagcagcgttagtcatcaccgcgataatcacttgatcaaacaagtgacttgcccgttcaacagtatcgagatgcccatttgtaaacgggtcaaaacttcccggaaataatgcaattttcggcatatagctgcctcctaaccaataaatttaaagattgctacttctgtaatcccataattctgttgccgtttcagtatgtaatgcggaatgtcagttggataatcaaccgtcgtatcggtttcgcaaagaatcgtcgcgtctggtgctaataaccccatttcgacgaattgttgtaactgaagcaacatctgttgttccttgtagggtggatctaataaaattaaatcgaattgaacaccagcatccgctagtttcaccaacgctttttcagctggcatcttccagattgtaaagcattctggcattttagtaaccgcaacgttttcttcaatcgtttgaatcgctgcatattggcgatcaactaaataagcatgatccataccgcgtgaaacggcttcaattgcgagaccaccgctaccggcatataaatcaagcgcctgcccaccgtcaaaaaattgccccaacatactaaacattgcttctttaaccttgtccgttgttggccgtgttttcatcccagggacagcttttaacttgcgacccccaaattctcctgcaataatccgcatctctattactcctctaattctgccgcatcggcaatttcttgatctgagcgtcctactcgattactgaaatccatatcaatagctggtctttcagaaggggtcactcgtttgacgtagtgtaatttttttaaccgttgcataacagtttcggcatctgccatatctacgtatagataaacatatttcattcgtttcgaggtgtaatacacaagtccgtaacggcgtaattgctttacttgtcgtaatgaatagagccagacgacaattccttggcgttgtgtgatttccaatgtcatttaatcagtccttttacatttagtcaaaaatcatcattgtttgttcatcggtacaaagaagcgttaagtgctgatagcttggattattaatcgcaagttgcaacgctagattctgttgttgtgcaagcaccagcccttgggaattgagcccttgtggccaataaaaaagttgctcgcgctgcggaaaacccgctgctcttaacggagcctgtttaaagtcggttgctgttaaaaaggcgtccgtctcttgtgtcgcttgtttgcgcacttggtgcagcttttgcagtccctttttagtcaaccactgcgttggtgtacttgttaattcactcaccaaattctgtgtattttgcaatggtagttgatttatcgtgagcgcaggttggtcattattttggcgtaatgtctgcaacgtttgcaccaaagcgagttgtcgttgactatctgtttgcggttgttgcgactttgctagctcatccactgggactggtgtttttgaaacaactcgatataaatcagtttgtagcagtcggttcgcatttaaatacatcacagctgtcaatcgttcttgctgcatcactaaagttgcaaacgtctggtttttaaacatcactaacggcgtttgttggtgttgctccggcgttaaccgcaacttaaattgttgctcgtgtaacgtcactaagagcgaagttggtaacgccgtcttcttagttaatgtagcccgcttttgaaaaaaatgaaacggcgccacatcgttgtccgcaccaacaaccatgatttgttgtgtttgattggattggttatcaatcagcgcttcgacatactgtcggctatctaagtgaaataaccaccgtcgttgattttcatcagtcagctgttgctcgaccggttgcccataggttgcaattaattgttcagctggttgattaatcagtttcgccggcccttgtgttttcgtcagtggcgtttgttttattgaccgttcagtcgacggggcttgtgcaaccttaggctgattaaccgctggtgtttggataatcggccaaccataaaggatgaccaaccagacaatcaatgcaacgattaatcggcgtgccccttttatcatgctttcacctcactaattcgctgccgcagcttttttctcttgtgcgctgatgttcaacacgattcccagtgcaatcgctagaaccatcatacttgatcccccataactgatgaacggtaacgtcaccccagtaatcggtaagattcctagcaacccaccaacattgaatagggtttgcacgaaaatgatagtgccaattccgtaacataataaagtgtgatacatcttagtcgcatgaatccctaggtaaaaaatccgtgctagtagcgcaaatagtaacgcgataatcacgagggtcccaatcacacctaattcttcagtggtaatcgataaaataaaatcggtatacggttctggtaagtaaccgcgcttttggatactattgccaagccccaagccaaaccaaccaccattattaatcgcatagtaggaattcactaactgactcccacccatattttccaattcaaatggatgtaaaaacgataaaatccggttgaacttataagaattaacgttcgttgaaaagttaaagtgccgtaaaatactaaataaaatcataaccgttgttgtgaccgctgtaatcagcgaaaaaccataccaatatgacataccggtgccaaaaaacatgactaccatcacagcagccaagatactagcgccccctaaatcaggttgaataaacaccagtaggatgattccagcgactaatacaaccggactaaagaataattttaaattatcaacaaatccgtcggccagttcattttccttacgcgagagcatattagcaaggtaaataacaatcaataacttcgcaaattctgacggttgaatggtcagtggtcccaattgaatccacgcggtagccccattaatcgctgcgcttggtctgaaacgacttaacagcaataaataaatgagcgccaagaaaaccacaatcgtcattgcttttagaaaagtgcgattttttaaaacggataacttaagaaaatatgtgatcatcatcaagataaagcctaatgcgataaacactaattgcttggtaaaatacgcatctggtttcattccgcgaattgacattaaatccgaactcgccgaatagaccattaaagcaccaaatgcacataagataacatatggtagcaataaccaatagtctaaatactgaattttacttttttgaaactttttccacacagttacacctaatttctatttcgttcgtattcagcctgtccttgcccaacttgcatgccaatttgattgacccgttcttctaactcacgcatcaaagttgcaccctgtggcgcactaataagttgcatccgttttgcaaaatcaacctcgcgcgagaaaccaaataattgggtatcaattacctcttcaataattggacattgactcatacaaagcgcatcaatttgagcacgcaatagttgctcaatgcgtagcgcatccgcttctaaagtgagataagctgttgttttttgttcaatcataatttacgcctacctattcgttattaaaaagcatactctgttcgttattataccatatttatgcacaaaaaaaggtagccaagcggctacctctaatggtttttaatgattaaccttttttacgtttcttatcagctttttgacgcatacttgtgtcaagaatcttcttacgtaaacgaacagaagtaggtgttacttcacagtattcgtcatcgtttaagaattcaattgattcttcaagtgacatttctttaggtgtcttgatggcagctgagtgatctttaccagaagcacgtgtattcgttaagtttttacccttagtaacgtttacggcgatatctgtatcacggctgttttgaccaacaatcatgccttcataaacatcaacgccagcgccgatgaataattggccacgatcttcaactgattgtaaactataagttgttgatgaacccgcattgattgaaactaatgcaccgttacgacggcctggttcccagttcttaatcactggcatgtatttttcgaaggtatggttcataattccgtatccaccagtcatcgttaagaattctgttgaataaccgattaaaccacgtgaaggtgctaagaaagtcatccgtgtttggttattagcatcactttccatgttttgcatttcacccttacgttgggccattgagtcgattactgagcctgtatattggtcaggtgtgtcgatttgaaccatttcgaaaggttcgcatgtaacgccatcaatatcgcgatagataacttctggacgtgacaattgtaattcgaaaccttcacgacgcatttcttcaactaagattgaaagatgcaattccccacgacctgaaacaatccaagcgccggctttgtcggtatcttcaacacgaagtgaaacgtcagtgtgtaattggtgacgtaaacgttcttcaatcttacgcccagtaacgaaatcaccttcacggccaacaaatggtgaatcattagcagcaaatgtcatttgtaaggttggttcatcaatccgtaagattggtaaagcttcttgatggtcaactggtgtaacagtttccccaacatagatatcttccatcccagaaacagcgattaaatcgcctgctttggcttcttggatttcaacacggtctaaaccgatgaaaccaaaaatcttagttacgcggaagttcttagcagaaccgtcaagtttaagaacagaaacttgatcaccgatcttgattgtcccacgagaaacgcggccaatcccgatacggccaacatagtcgttatagtctaacattgccacttggaattgaagtggttcgtcactattatcaactggtgctgggattgtatctaagattgtgtcaaagatagggttcattgtatgggcttgtgtatctaaatctgattcaagacttgatgtcccgttgatggcacttgcgtacacaactgggaattcaagttgatcttcatcagcaccaagttcgatgaataattcaagcacttcatcaacgacttcttcaggacgagcgcctgggcggtcaattttgttaatcaccacgattggtgttaaatgttgatctaaagccttcttcaaaacaaaacgtgtttgtggcattgtgccttcaaaagcatcaacgactaataacacaccatcaaccatcttcatgatccgttccacttcaccaccgaaatcggcatgtcctggtgtatctaagatgttgatttgtttgccgttatatttaacagcagtattctttgaaagaattgtgatcccacgttctttttcgatatcatttgtatccattgcacggtcagaaatttctgcgtgaccatccaatgtatctgattgttttaacatttcgttaactaaagttgttttaccgtggtcaacgtgggcgataattgcgatattgcgaatgtcttctctttttttcaagtgtttcagcttcctctcgctagtgacttgactagtgttgtttgtctcatgtatacaagctaatattttaccataaaaaaatgggctgtgcttcatatattagcgtttttttgaaaatacgcaagtttttttcatgaaaatttaattatctttaatcatttgaaccattcataatcgtgacaatttcttgtattgcttgctttggcgcgataatcatcccttcttttcgcatcatggaaattggttgaccatcaaattgtaaaacttgaaaacctaacgtctcagctaaaacccgacctgcagcaatgtcccatggcgctaatttggagatgtaagcttgcacttgccccttcaacaaatgggcgaaagtgataccggcgctaccgtaaatccgcacacccgaacattgatacaacacctcttgcaagtgtgcttcattggtgaccagcatccgtgtattgacacagattaacccttcttgcaacggctcgtcgacagcatttttgagggcagcttcgttttcgaatattcccaactgtggaccgccccagaacaattgatcggccatcacatcataaataatcccgaatagcggctgaccgtcttcataaacgccgatcataatggcgaaatttgcccgttgcttcacgaaattcatcgtgccatcaatgggatcaataaaaaaagttagtccctgttgccaatcatcaggcacctcaccggcaccttcttcccccactaattgcgcgttcggataagccgtcttaatcttttcagctaagaaagcttgattagcacaatcgacattagtcactaaatcattaggcccagacttagtactaaccgttaatggttgtttaatttgtgtgcgggtataggcagctgcttcaaggatccacttttgcagcgaacgacttaaccgatacaatgcttcttgttccattttttcatccactttcactaattaagcgtcattttgatttgggttcgactactcctctttgcagcctgcatacaccgatatattgaatagcctgacgcttctgaaaaggccttatcaatttgtttttcttgcatcttactttgaacaaccactttgaagtcacgataagcagcttgtaaatccgcaactttcgcaccaaattcataagcttgttcaacaagattatataatttcatgacttggacaacttcagttggcgtccagtctggttctaaaggataactatagttcgtttgcataaaggctcctaaaatttgcataaatttgcgccagtttcaattctactgatgccattaatctctcacattataacgcatttttttagaagctgtcgaatccttttagaaatagcggaatcaaaaaacgacgcactcaactggtgcgtcgtcattctaaactatttattaaatatgaattggcaatcctaatgctaattcggcatcatccataatcgcttcacttaacgttggatgtggatgaatggttagagcaaggtcttctgcattcatgcctgattcaacggctaacgtcaattcagaaattaaatcactcgcgccaacgccagcaacttgagcgcccagaactgtgttgtcatccgtattcgtcactaaccgcacgaaaccttctgtatctgctaatgataaagcacggccattagctgcaaatgggaacttaaatcttttagcgttcattccttttgccttggcttctgcaaccgttaaaccggtcgttgccaattcaggatctgtataacaaacagctggcattgcgtggtaatcaaccgttaatttcttaccggcaatggcttctgcagccactttagcttcataacttgctttatgcgccaaagctgctccagcaacgatatcgccaatcgcatagatgcccttaacgttagtttggccttgttgatcaacttcaatcaaaccacgatcagccatcttaataccggcttgttcgagtcccatttcgtcggtatttggccgacgaccaacagtcaccatcacgtaatcggcaacaagttgttcttctttgccgccgacttcatatttaaccgtcacattttgatcagtttcaacagcttcttttgccattgcgccagtaatcacatcgacccctttagctttgaagttctttgtcaccaattgcaccatatctttttcgaagttaggtaaaatcgagtctgtcccttcgagaatcgtcacatgtgcacctaagttggcataggcccctgctaattcagagccgatatagccaccaccaatgaccactaattcttttggtacttccgttaagcttaaaccaccagttgaatcaataacccgtttattaaatttgaagcctttaatttcaattggacgactaccagtagcaatgattaaatttttaaaactgtacgtttgtgcactctcttctttaatcacgcgtaagctatgttcgtccactaaaaaggctgaaccgtctaacacatcaatcttgtgttttttgaacaacattgaaatgccaccagttagtttttcaacaacctcatgttgtttccagtcttgcgttttcgcaaaatccaatgttgctccagtagtcgtcacaccaaagacagatgaatctttcgcctcttgtagtcgatgaccagctgaaatcaaagccttggaaggaatacagccgacgtttaaacaaacaccgccaattgtttcacgttcaatcacagttactttttgacccatttcggccgcgcgaattgccgcaacatagcccccaggacctgaaccgatgactactgtgtctaattcaattgcaaaatcacctacaaccattttaaaatcatccttccatcaataatagctctggatcagctaataattcttttaattcgttcatcgcacgttgcgcagttccaccatcaattaaacgatgatcaaatgatagtgataatttcaagactttgccaacagccaactcaccatcagcgttgacgattggttctgtcccaattcggccaacccctaagattgcaacttcagggtagttaacaaccggtgtaaaccaaccgccaccaattgatccgatattactgattgtcattgaaccaccactcatttcagctggtttcaatttgttatccaatgctttttgcgtattttcgccaatttctttagcgatggcaaaaatactcttgctgtcggcatccttgatatttgggacatagagcccgtgatcagtatccgttgcaattccgacattaatgtagtgtttataaacaatttcgttagttgcatcatcaattgacgcgttcaaagttgggaagtcacgtaagaccgttaccaaagctttaacgatgtatggtaagaaggttaacttaatgtccttcttagccgctacatccttgaatttcttacgatgggtcatcaatttagaaacttccacttcatcgaataaagtaacgtgtggtgccgtatgcttgcttgtcaccattgctttagcaattgctttccgcgttggtgacattttttcacgtgtttcccgttctggtgtcgcagaggtgtatggtgtcgcagcaactggttgtgcagctggtgttgctggcgacgttggttgttctgctgtctctacagcaggtgctgtcgttgttgcagcgccattttgcatgaagatttgcacgtcttctttagtaatccgaccatgtttaccggtggctggcacttgactgatatcaacatcgttttcacgtgcgaattgtcgaacagatggcatagctaaaatcgtccgattttggtcactaatcgcaactactgcttgactgcttggcgccgttgttttagctggtgttgattctgacgccgtagctggtgcttgttcagcagatgttgccgttgccgaattgtgacctggagcatcaatttcgaccaatacttgaccgacagtcgccacttcgccttcaccgactaaaattttaacgactttcccactaacaggtgatgggatttcttcaactgatttatcattttgaacttctaataaagtgtcatcttcttgaatggtatcgccttctgcgaccgcccatttttgaatttcaccttcggcaatcccttcaccaatatctggtaatttaaattggtaaacaccacctgcatcggttgcagtcggtgttgcttcgggtgtagcagctggtgttgccgtacttggtgtatcgttaccttcaacacctggtgcgtcaatttcaaccagtacttggccaactgttgccacttcaccctcaccgactaaaattttaacgactttcccactaacgggtgatgggatttcttcaactgatttatcattttgaacttcaagtaagacatcatcttcttgaatcgtgtcaccttctgcgactgcccatttttgaatttcgccttctgcgatcccttcaccaatatccggtaatttaaattgatatgccatacgtctaacgtcccttctttcgttatcgactaaaagttaataacttctttaaccttattttcaatatcagttgcatttggtaaccaagttgcttcagcttgtccaaatgggaatggcgtatcaggagctgaaacacgtgcaattggagcttccaatgaaagaacagcacgttctgaaatttcagaagcaacttgtgccccaacgcctgcttgtttttgtgcttcttgaacaataacgacccgccctgttttttcgacagaggcgataattgttgcaacatctaatggtgcaattgttcgtaaatcaattacttcagctttaatattctctttagctaggttttcggccgctttaatcgcttctctcaccattgcaccgtaagtgatgattgaaacatctgtcccttcagtaaccacagctgctttatcaagcggcactgtataagattcatcaggtacttcttcgcggaacgaccggtataatttcatgtgttcaagatacaaaacaggatcgtttgaacgaatcgcagaaatcaataagcctttggcatcatatggattacttggcacaaccacgcgaatccctggaatttgcgtgatcattccttcaaagttatctgaatgtaattctggggtatgcacgccaccaccaaatggtgcacgaatcgtgattggcatgttgcgtgtgccacccatccgataacgtgtccgtgacatctggccagcaatcgaatccattgtttcgaaaacgaaaccaaagaattgaatttcaggtacagggcggaagccttctagtgctaaaccgattgataaaccaccaatcccagattcagctaacggtgtatcaaaaacgcggtcttcaccatgtttagcttgcaacccttcagttgctcggaaaaccccaccgttcttcccaacatcttccccgaaaatcaagacgttcttatcatctgcaagttctaaatccagcgcatttgtaattgcttgaatcatcgttttttgtgccatcttaattcgactcctttgcactgtactctgcgatttgttctttaatgttttgtggttggtcttcaaatgtaacattcaagaaatctgtgactttttgttttggcgcagcatccgcttcgttgatggctgctttaatgtctgttttaacttgttcgatcaattggtcttcttgatcttgtgaccaaagtcccttatcagttaagaaacgacgcattctaacgagtggatcacgtttcaaccaaatatcgtctgtttctttggtccgataacgagtcggatcatcccctgataatgtatgtggtccataacgataggttaatgtttcaattaagaccggtccgttgccagcagttgtaaattcacgcgcttctttcatcacttcataaactgctagtggatccatcccatcgacttgaatggcagaaatcccagctgcgacccctttttgagccaacgttacagcagctgtttgtttttcacgtgggaccgaaatcgcaaagccgttattttgaacaacgaaaatggctggtgctttaaaagcacccgcaaagttcaagccttcatagaaatccccctgtgaagtcccaccgtcaccggtataaacgtaaacagcattttctgattggcgcttcttcatcccaaccgcaacacccattgcttgaatgtattgcgcgccgataatgatttgtggtggcatcgccttcaaagattctggatacttgttaccgtcaatatggcctcgtgaccataggaatgcttgtgataaaggtagcccatgttgcactaattgtggcacatcccggtaaccagggaataaaaagtcgtctttagtcatcgcaaagttacttgctaattggctggcttcttgcccagcagttggtgcataaaatcctaaccggccttgacggttcaaagcagttgctcgttgatcaagcacacgcgaccaaaccatttgtttcatcagttcaaccaattggtcatcactgagatccggcatcaattccggattaacaacctggccagtctcatctaaaatttgaacggtcttaaaatcttggctctcatcgctcaataacttctcaaaattaactgcagctttattattgaccatagtatccatatctcctctttaaaaaactgttttaatgactgcttatatctgtattacttaagcatctttacaagactaatttagcatttcacatcactaaatgcaagcgttttataagctatattagtcagtttacgctttcattagtttttattacatgtgaatctaatcactagttagctaattttcacgtctgttctatatctgttataatttaatttcgttttctgttatataatagcaaataataggcacaaaaaaagagtccgccgtagcagactcatcgttaaatttaagttggggtagttctatgccaagaccggttggggtatctcagcgttgccagcatgcactaagagctcttgaaacactctgactactggtttaatttgttgactgacttgcacgcaccgttcacttacccgcaaatcatttaaatcaatcgcaaccttaatttgaccaaggttgactaacttaatcattgttagcaggattgccccgacaaccaacgttgccaagcccatgaaagcgaattgattaaccattaatactgcacaaaacgaaaccaatgcagctaccgccatcataaaagtgcttcccactctaactttaggtgtttgtgctttagcaccaatcgttgcatctagcacaacgccgtgcaccatttcagtcactacttcgcccgcttcaataacgttaacatctttgttaactgttgcgattgtaacgggtgtcttttcgctagcagccaatactaaaatatcaccgggcacaatttgatctgcaccgattaagcgtaaaaaaccatcacgcataacgctaacccgtgcttgtgaattttctaatactgcttctcttttagcagcttcgacagttgttaagccacttggccgagttgccaataaacgcattaacatcccactgcttttaatgccagtgatgttaacgtctttttttaatttcttgtgcatcgcgttcgacactccttcccttttgaggaagtcgtcgtaaaccgctagcctaatgctggcagtaaaatgacagaccacctcgaatgatcaccatcgctactacttacaggtccttcagctgttttcatcattttactcaccagactttctctactttaaatttagtcataccgctttatccgacaaaaaaagacgcacaacaattgagcgtcatccatttatcatggcgttcccaatcgttcagttttagcactatatgacgtagaaaccatgttcagctacgttagaaaaagccttcattggcagtttcagttgactcaattggcatctctcgatgtttctgagtagcagcgtttgttcatataggagcctcacctaacggaaaagcaatatatctatactcttatactacccgtttcactttagcaggtcaagcaattcattccgttttaacttgaattgtgctagaataatgaatgacgaattaatcggaggtcttaactgtgatattaatgaaagatattatccgcgagggtaacccaacacttagaaaaatagctgaacctgttacttttccactatcagatgaagatcggcaacttgctgctgacatgatggcatttttagaaaatagccaggatcctgaacttgctgaaaagtaccacttgcgcgctggcgtcggtttagctgcaccccaagtagatgtttcaaaacaaatgtctgctgtcttggtccctggaccagacgaacccatcttcaaagatgtgattatcaaccctaaaattatcagccactctgttcaaaacgcagcacttgctgaaggtgaaggttgcttatcagttgaccgcgaagtgcccggctttgtgccccgccctgaccgtattacactacgttaccaagatttagacggtgaaagccacaagattcgcttaaaaaactacccagctattgtgtgccaacacgaaatcgatcatctaaatggcatcttgttcttcgatcacatcaacaagcaagacccattcgcagcaccagatgacatgattattattgaatagaagtgcgattggttgtgcttagcaactgagcattaatacagaaatggcagttatcccgaattgtgggataactgccaattttagattaaacgggagttgttgcacccaagcgcacgttaaagaagaagtgctgattcgagttggtcaggctttgaggcttaacggtaaaggctactcgagaagcacataaaaaagcgtgattgaaatctcattagaagatttcgatcatgctttttttatgcttccgccgcttcaggcgtatcggcaaattgactgttatataaattagcgtacacaccgccggcagctaatagcgaatcgtgcgtcccttgttcaacaatttgaccatggtccatcactaaaatcaaatccgcgtcgcgaatcgttgagagtcgatgggcaatgacgaaactcgttcgcccttgcatgactttttccatggctttttgcaataaaccttctaatcgggtatccaccgaactagttgcttcgtccaagattaaaatcttaggatccgcaatcacggctcgggcaatcgtcaatagttgtttttgcccaagcgaaacgttgcttgcttcttcatcaatcgtcatttgatagccgtttggcaacgtatggataaaatgatcgacattagcggttttagccgcatcaacgacttcatactctgtcgcatcgagtttcccgaaacgaatattatcggtgattgaagcatgatataaccaagcatcttgaagtaccatcccaaattgggaacggacttgttgcttgcttaattgcttcgtgtcaaccccatcaatccgaatcgttccagatgtcacatcataaaaacgcatcaacaagttaatcatcgttgtcttcccagcaccggttggcccgacaatcgccactttatcacctgggttagcagtaaagctcaaatggcgaatcaatggtttgtctgggttatagctgaaactgacatcatcaaattcaactttaccttgaacgattgctggcaacgatgctgtttcattatcggttgcttcaactggctcatctaagatttcaaatacacgaccagttgcagcagcagctgattgaatcacaccagacaactgtgtaatctgtgagattggttggttcacttgccaaatatattgaatgaaggcttgtaaattaccaactgaaatcacaccgtgcaagacataataaccacctaacgttgccatcccggcatacgtcatgtttgtcgttaaaccaactaacggcatcatcaagccagaaacaaagactgccttaaagccatagtcagttaaccgatccgtaatttctgcaaaagcagcaattgcgcgttcttcttgtccgtaaagtttcaagacactgaagccgccataattttcctgtacaaagccgttcatttcgcccaacgtgtcttgttggcctctaaagtacggctgcgatttctgaatgacccgtcttgaaatcaataacgatgctggaatcattattaatgataagagcgccatccaaatattaatcgtaatcatcatgatcacggccgtgatgatccctaagatcgatgtcacaacttgaattaaactctgttgtaaagcgttcgtaatcgcgtccacatcgttggttacccgtgacaagatattcccttgttgttgtgaatcaaaaaaacgaacgggtagcgcattgatttgcaaatcaatgtcgcgccgtaaatcacgcatcgcccgttgaacagcccgcgtcatccaaaacgagcctaaaaacatcgtcacttgatatagcaacgcaaagctcaaaatcatcgcaatcaccttcgcgatataactaaaattaatcgcaacgtgttgtgctaaactccgactgatttcagtaatggctagtcccatgatcactggccacagtgcattagcgagcaccgaaataacagttgcggtaatcgcaagccaaaatgtcacttgatacggcccaatgtagcgcattagccgtttaagttctctaatattcttcattgagttcctcctgtgataactgtgatgccgcaatcgcacgataaatctcgttatcttttaataagtcgcggtgagtcccaataccaaccacttgaccttcgtttaagacgacaatccgatcagcattcatgatagtcccaactcgttgtgccacaatcagcactgttgcctctttggtgattgacttcaatgcacctcgtaacgccgcatccgttttataatccaatgctgaaaaactatcatcaaagatataaagcgcggggcggcggacaatcgctctggcaatcgccaaacgttgcttttgaccaccagataaattgctcccaccttcggctaaataagtttgtaagccgtctggtttttcagcgacaaaggtatctgattgtgcaattttcaaagctgtccataattcttcatcagtcgcattcggattaccataacgcaagttttccgcgattgttccggtaaataacaccgctttttgtggaataaaaccgatcttttggcgcaacgccttaagttgatagtcgcgcacatcatgaccgtcaagcttaatcgatccacgtgttacgtcaaaaaagcgtggaatcaattgaatcaacgttgacttaccactcccggtactcccaataaaggcaaccgtttcacccggatgcgcttggaacgtgacatcccgaacgactggactttcagtcggacctggataagcaaaggagacattatcaaacaccaattcaccttgtgtgtcggttgttgttaccccgtcttctttttcggtaatattaattggcgcattcagaattttttcaattcgttctgctgaaacagcggcccgtggatacatcatgaagacactggcaaataacataaatgaaaacagtacgtggaaaatatattcaataaacgcaatcaacgtcccaaccgctaagtgaccaccatcaatctgaacagccccttgccaaatgattagaacgaatacgatattaaagatgaacgaaaagcccggttgtgctaaagccaccaacgtaaacagccggatagaactatgactgtagtcatcattcacttttctaaagcgtaatttctggaattgttcccgcacaaaagcacggacaacacgaatcccagtcaagttctcacgcagattcagattaatcgcatccagatttttttgttgttccgtcgacatcggttcagaaacgcgaccaatcaagacaacccccgttagcaggattggaattgccgcaaatacaatccatgagagcgattgacttgtccgtacaatcatgaaagcactcgcgacgatcatcatcggggtcataaaccctgtccgcaacacttgggtcataaattgcatcacctggaaagcatcattagtggtccgagtaatcaaagaagacacaccaaattcgccatactcactatgggaaaactgcatggtttgtttaaaaatatcgttacgaatgtcacggacgatattggtggttaatttgctaccagtataagccaagccaattaagccaattagtccgattaaacagattccaaccatcaataacccaaattgccacacaggaccaaaggtatgttgattaattcctttatcaataatttgtcctaataacgttggtaatcccaattcgattagaataaatccaaatacgcaaataaagttccaaaatagtaatttcttatatcggatcgtatagcgccacattaatttcatcggtgcaaactccttctagacttcaaatttaatcttctacctgtgccatatctttaacatactcgattgtttcgcgattgacaataaaagcaacgtcaaaatgcaattgttcttccaaaaaccacacatcagtgactagcaaagccggataacgcggactgacggaggcaatccgccgttcgtaagccacttcattgagttgttcctcaattgcggctgccacatcctttagtgcagacgatgtttgtcggatgggcacttggtactcgaagaccatcacattattgccccaaatttcagtgggcaggttcgaaaccagtttggcttgcggtgcataaaaatccggctgactcgcttgcattttttgataagccaccgttgcaatttcatccgcaatttcttgactactgtgttgtaaaatccgcgtcgctctttgtcggcgtaaccgtttaatcaaccaggttaaaaaaagcgctaacgcgacaatgataacgactgacaaccaaattaacataacaatcccccacttctattgctcactaatatgataattataaccgaatcgaggcaaacacgctatttagagcacgtcgctcaatgtatactttaccgaaaagatatgctaaaatattcttaaatgttgagtaatcaacccctggacggttaatctttcgtttaaaactatgatgaataataaaggagttttacaattgatttataaagtacttttccaagcagacaaaacccaaagccctctacgcgaggcaactaaatcgatctatttagaagcagacagtgccgttgaagcacgccaacttgttgaagacaatactccctacaatattgaatttgtacaagaattatctggtaagcaccttgcttttgaacaagaatcagaagattttaaattaacggagttttaattaaatgaaactcgatattaagaataacgaaaccgccgttttcgccgtagggggacttggtgaaatcggtaaaaatatgtatggtgttcaattccaagacgaaattattgtgattgatgccggcattaaattccccgaagatgaactcttagggatcgattatgttatttcagactatcaataccttcaaaagaaccaacaaaagatcaaagccctcgtcattacccatgggcatgaagatcacattggtggtttaccttacttcttgcaacaagtccctaatgtacccgtctacgctggtccattggcacttgccttgattcgcggtaagttagaagaacacggccttttgcggtcaacagaattacacgaactaaacgaagataccgtccttaaattccgcaaaacaagtgttgatttcttccggactacccattcaattcctgatactttaggggttgcgattcatacacctcaaggggtaatcgttgaaactggggatttcaagtttgacttgaccccggttggtaatcaaccttcccctaatcttcaaaaaatggcacgtttaggtgaagaaggcgttttatgtttaatgtctgatagtaccaatgccgaagtaccaaactttacaaagtcagaacgtttcgtcggcacttcaatccgccatattgtggaacgcattgaaggtcgcattattttcgcaacgtttgcttctaatatttcacgggtctcacaagccactgatgctgcgattgctaacggtcgtaaaattgccgtctttggtcgcagtatggaagcagcggttgtcaacggtcgtgaactcggttatttaaatattcccgatgaagctttagttgatgccaatgaattaaattcgttgcctgccgacaaagtgatgattctatgtacaggatctcaaggtgaaccaatggctgctctaagccggatcgccaatgggactcaccgtcaaatttcaattcaacctggcgacaccgttgttttctcaagcaatccaattcctgggaatacaatgagcgttaaccacgtgattaataagctttcagaagctggtgctgaagttattcacggtaaagtgaataacattcatacgtcaggtcacggtggtcaagaagaacaaaaattaatgctccggttaatcaaaccgaagtacttcatgccttgccatggtgaataccggatgcaaaaaatccatacggaactcgctcaacaatgtggtgtggaacctgataactgcttcatccttgaaaacggtgacgtcttagcactcacttctgactcagcacgggttgctggtcactttagcgccgaagacgtttacgttgatggcaacggaattggcgatattggcaatgtcgtgctccgcgatcgtaaaatgctctcagaagaaggtttggttgttgttgtggcaactatcaatcttggtgaaaagaacattctcgctggtccagatatcctctcccgtggtttcgtctacatgcgtgaatcaggtgaattgattagcgaagcccaacgccgagttttccgaatgatcgtcaatacgtttaacgctaacgacaaggtcactgaaaaccaagtccgcgaagcaatcattgatggcttacaagacttcttgtttgaaaaaacagaacgccgcccaatgattttaccaatgatcattcaaagtacagaataataagttttgcgccaggtcaatatatgacctggcgctttttttattgtttaatgcaagtttttattgtcaacatttggtaaaaaccgctataatatacaacagattactttttctgaaaggcggcttgtccatgccctccaatccccatttttacatcattttaaaccaagttgccggtaccggtcaggcagcgagtatctggcctaaaattgaaactcaattaaaacaaaaacaaattcactatgaccttcaactctcccactacgcaggtcacacgacccaattggccttccaatttgcaaagtttaagtacacggatcaaattttattaattattggtggagacggcacgctcaatcaagccattaatggtctccagaatgctcagcgcggcgatattccgattgcttacattccttgtggatcgggtaatgacttcgcccgtggtgtcgggattagtcgtgatccattgaccgcactcgaacaaatcttgtcggccacaatgccaactgccatcgatttaggttattatcatgacacaacgaagaacgaccatggctacttcgttaacaatgtggggattggttttgatgccaacgtggtcagcaccaccaatcattcaaatcataaacgacttttaaatcgattgcacttaggctcattagcttacatcagctcattggttaaagtttttatgcaccaagatgcatttgaagtcaccgtcacggctgatcaccaaaatcattattttaaacgtggctttttagtgaccaccactaaccatccctactttggcggaggggtccccatcatgcctagcgcaacggtcgacaaccatcaacttgatttaattgtgattgaaaaattgaatccctttttcttttgctatctttttgtgatgatgttgtttggtcggcacacacgctatcaagcggtgcatcactttgaaggaaccaacttagcgattcaaacaaaaacattagaattcgggcaaatggacggtgaagaacttggtagccggacatttgatattcactacagtcttaaaagccaggcattttggctaaagaagcaagcataaataaaaggcgctgcctccaagttgggggcagcgccttttaacgtgctcttcaaatcatgttcctgtgcctagcaacacaagtcaaccgattgctttcagcaatcattcgcattgttaggctagtgctcaaaagttggccaaacttgaatgcactcatttctttagaagtaatccgagaagtatggttggtccattggaataatattctcgagattttttagtgcttgtcggttggcttggagtctttcaatctttgccaagtatgatgggcgtcgatagctcatcagcattgttgttagtgtctggatgtcgcattgaattcgttcaccgactgggcgacttgtgacctgcacttttccttgttcatcccaataaacgccaaacgtaccgttattccattcagctaatggatcggtcaattcaatgtggaatgcttgcccgtccgtttcaaacggataagccaacaagaattcacgcacatcaacaatccgcgccataaaatatggcttaatcgtctggtcaatatcaccatcttctaataagaatgaaatcggttcatcctgatattgattacccttgacatgttcaatcattgaataatgcgcgccaatgaagttccacagaccaatccgggcttcttgattaagataaatcatttctttaatatggaagacttcgttggcaatccagtataaaacatagccggtgggttgttcattttcatcataataaacaccagcaatccgttcttcttcattttcccaacgccaatattcatcccagttcagttcgttacgaatcattgcaccgtgattttttagtgcaaaccgttgatacgttttaatcacgtcttcatcgtcaatatcaaggcgttcaacgtgcccatttaccggccgttgcttaggtaattggctatcacgaatatcataagttaggtgatcagacatgatctcccaccctttcttacgataaaacggaatgctgtatggatataaatacgatatccactgcttattctcacgcatcttgttcaagccgactttaaccaagtcatgcatcaaaccatgaccggcatattccgggtaagtcccgacaccagtcaaaccacccatgttaaatacctggccatgaatgttcacgcggcaatgatagatggctaattgtgaaatcagttcgtccccattaaaccatccgattacgtcagatttttctaatacgggacgtttggcgcgttctaattcgccctcttcgtagccactatcagaaacttcctgatcggtgacttgaaaaacataccgtaataagtcattaaattgttctaaatgttcaattgtcacgggtctaatctctaaattagatcgctggtcaaccattgtttcgcctcatttttcgttagttgttttccctattatacactattttgatttcggcataaaatcgtacggtgtcaccccggtcatcccaatcattggatccacttgctgttgcgttagaacagtcggtgttaagacataactgattggcgtttcttgtattgcgtcgtcgtcttctggcactaagttcagttgttcatcaacagccgtttctggcgcacttggtggtgccggctggtcaacaattgttttggcttctgtctgccccacactggccgtcttaatggcggtgctgagttgttcaccgttaaagacactttgaatccgttcttttaacgtcgtttgccgattggccgaaagttcctgagctgctttttggaaagcactcggttcaccaatcagaatcaacaatgatttagcccgcgtgactgctgtgtacagtaagtttcgcttgagcattcgttggtattgattgaccaatggtagaatcaccatttcaaattcagaaccttgcgccttatgaatcgacgtacagtaagccaatgtaatcttgtgccactcactccgcttataggtcacttctgcactatcaaaagcaatggtgatctcgtcaaccttgtccgcactctttttagcataggtaatccccgtaatctgcccgatttcaccattaaacacattttgttccggactattgaccagatggagtactttatcgccaatgcggtagtgaacgttaccaatgctaacttgttttttgcggtcatctagctttggattcatgatattttgaatcatcgggtttaactgatcaattccggctgctcctttgtacatcggcgctagcacttgaatgtccttggtttcaaaaccacgcgctttggccttagtaacgacttgttcaatcaccgattcaatttgatacggattacattgaatgaaactgcggtctttttgcggcttcaacaaatccgctggcagttggccttgattaatttcatgcgccaacggaataatcgttgactggtcatcttgccgataaatacgttgtaattcaaccgctggaataaccttactctgcaataaatcaaagaaaacttgccctgccccgacggatggtaattgatccttatccccaaccaatacaacctgcatatgactgggcaccgcccgtagtaatgagcgaaacaagtaagtatcgaccatcgacatttcatcaataatcaataggccgccttccaattctttgttaccggaaacatctggattattttcgcggccagtgattccgagtaagcgatgaattgtactagcaggcaaacccgttgtttcactcattcgttttgcggcccgacctgttggagcggccaataaaatcggaaacggcgtgtctttgtactcattaatatctaatgacagcccgtttaattcagcgtataacgtcacgattccgttaataatcgtcgttttcccagtaccaggtcctccggttaataagaacgcccggtgagtcatcgcaagtttaatcgcctcttgttgtacgtcatcgtatgtcatcttaaaccgtttttcgaggtggcgaatttcttgatctagatcatgtttaggatagctaagttgatcgcgttcattttcaattcgcattaaatggttcgcaatttgccactccgcattaaataacccattcggataaatccgattctcatcaccaacgactttcccatcatgtgcaagtgccatcagttgttcagccaccaagttcggatcaatggcaacattgcgtgctttttccatcaactcaatactagctgccaataacggcttggcctgggtataggtatccccagcttgattggtcaactcatttaacgcttgcattaaagccccttgcacccgcacggctgaatcagcggcaaacccgagggtctccgctaaattatctgcacgtttaaagccaatcccagcaatgtcagccacgagttggtacggattttcttggataatcttcagcgtatcttcatggtaggtctgatagatgttataggccatcgagctcccaaaaccatagttgtttaagccaataataatctgttccatcccattattaatcgtcagcgtttcaacgagttgtgcttgtttcttcgcatttagccccaatggttctaacgccgtcggatcctctaatattttatcaatcgcgtcaattccaagagtatccacgattttttcggccgttttctgcccaatgcctgtgaatttttcgccagacaaataagcgactaagccggccttagtcgttggttggtccacttggtaattatcggcttgaaactgtttgccatatttaggatgagtgaccactttgccatagaaggtatatcgttcatcttctttaatgtcgccaaaactcccggtcaccacaatttctgtttcgtgccagtcaatcgtcttatgtgctactttaacgagtagaattttaaaaaaattatccgggctctcatagaaaatactctggacggttccggtgactgttggtttggtttcgtctgtttttgctatatccacaatcgccatcccttattctttttgctctttagcctgcatgaagccttcaatatcaattaactgttgtttattctttttaaaataatccggtgcatagtgcttggcttgttcgaaataaggctcactatcagcgcctaagaccagttgcgtcaagccatacttaaataatacttcaccattttgaggtgcaatggtcaatgcctttttaaggtaggtctgcgcttggtcaaaatcacccaagctcgttaaaatatcgcccactaaaagattggcgtctagttggtctggttcttgttcttgaacggtcaacgcgaacgccaatgcccgtggattctgttcgagttgatgatatgtctgcgcaagcatatactgcgcatctgttgattgtgagtcttgcaccaactgcatgaacaagggcaccgcttgttgataagcttccgcttgataatagagtgttcctaatgcgtaagtcaatgcagcttcattaggaaattgcgtcaacgctttttgcaaaagtgcttcagcttgttcaaaatctttaagcgtcgttaaaaatgtcgcaagggtaacgtaagcttcaatgtcttctgagtgatcttgtaaatattgtacgagatctttaacagcggcttcgtggtcgccagcggcccattttgctagaattgcttgcacgtgatcatctcctatatcgtatctgttgcggataattgcttgctgaggaagtgtgtatcattccacttaattagtttgaaagatgctccttgatcgtcagttgtcatcgtggtcacagatgaatttgtcacaccgccgtctttgcggacctgagccaatggcgtcttgagtaaggactgcatcatcgccaccatcgctgccccatggctgacaataataatatgatcagccggtttagcggccttcacaattgcgtcaattgcctgcgtcgtccgttcaatcacttgttcaaaggtttcccctttaatttcagttggatcatactccgctggtgcttcacgaaaggctttcacgattgtcggatattgtttttcgacttccgtaaagcgcattccttccattagaccgagattaaattcgtggagtgcatcaacaaccgtaatcggaaaatcctgccctaagtctcgttttagcgccgcagacgttacctgtgtgcgttttaacggactcgtatataaatgatcaaaatgaatgggctttaaaaatgtggctaattcttcaatttcaacgtaactactgtctaataatggtgaatcaccgcgtgcaccttgatagcggccctccaaattccattcagtcttaccgtggcggataaaatataaggttgtcatgcgttctctccttaaaataacttacttttcattatgaaagagttacgccctaaattcaagtcaatcgactaataaagcaagcatttttcctgtaaaacgccatcaaaaaaaccgctaggataaaaatactttttatcctagcggtttcatctattagttgctctaaacgtgtttcagtaggcatatttctgcggttaaccctatttgccaaattcagttaatcctcaaaatatgaacgcttacttacacactcttttatttactttctgcgacagcttgcattgcaattgcgttgacgtagttgactggttgatcgtagtttggttggaagaacatgtcaaccattgctaattgatcaatcgtcatcttcgtttgaatggccattgaaatgacgttcgctgcttgagcaatatcatacatacttgtgaatgaaccacccaatacttgacgcgtcttaggatcccacattaagttcatcaaaaccggtgtcgttgatggcatgaaatcagggcggtaatcttgttctaacgttgttgtagcgacttcaatcccacgcactttcgcgccttcaactgttaggccactccctgaataggtgcgaccaaataattcaacggcagaagttgcttgcgtgcccatgtacttttcagttggtgtttcgatgttgcggccgattaaaaggccttggcgaacagcgttggttgccaatggaatgtaatctgctttttgcgttggattgtaatgaacagctgctgaatcgccggctgcataaacatccttaacagacgtttgcatgtattcatccgtcaaaatcgcaccgttacctaacatatcaacttgccctttgaaaaggccagtatttgggcggaagccaacacataaaattgcaatgtcggctgtgtattcgttcttatcagttttaacagtgacttgatccgtccctgagaaactgaccactttttcgctaagcgcgagggttacaccgtggtcacggtaatcttgttccacgatttctgagatattagggtcgaaattcttgccgagtgcgtgtggtaatgcatcgattaatgttacttgcttatcagttgttgcataggcttctgctaattcggcaccgatgtaacctgaaccaatcacgataacactcttcacatctggggcgctcttcttcaattcattggcatgcgcccagtttttgcagagcttaacgttcggattgtcgatgccttcaattggtggaatcacaggtgatgagcccgttgtgatgatgattttatcgaatttttcggttgtttcttcttccgttactaagttcttaacgcgtaatattttttgatctaagtcagcttctaaaacagtgtgttgcatcttcatgtgagcgcctgcttgcgctaacatttctggatttgaatagaacattttctgaggatcggctacatggccgcccacccaaagggcaatcccgcatgataagaatgataaattatcgtgtgtttcataaaccgttacatcccaatcaggatgttctgccaatgttgcttgtgttgcaaatgtccctgcgtgtgtacaaccaataactgctactttcatcatgttacctcctagaaatatccaaaaaacgacggttaatcgttgagaatttgtgaaatattacgcaaccagcatgtaactatattgtacgctacttagtttcgaaaagtcaattgcctccagctattaaattaatttcacaatctaaaacgaataaccacttatgttttaaacgttatattgtgattttattctaaaaaaggtcgttgaccacttattgaacaaacccacaaaaaaagtgctgataaatataaattcatcagcacttttaacgattaaattagatatattgtaatactttcatgtcagcatcatcgttcgcagccttataagccacgtcaatcgtgccgccacctaaacattctgcgccgtcataaaagacaaccgcttgaccaggagtaatcgcacgcactggatcatcaaagacaaccgttgcagttgtgtcagatgtcatgtggacggttacgccgacgtcttgttgacggtaacggaacttagccgtcacgtggaaatctgtcccatgatcaactggtgtgatccaagaaatattacttgcatctaattgatcagcatagagtaattcattatggtagccttgaccaacatataaaatgtttttgtctaaatctttaccaacaacgaaccatggatcattggattcgccaccgccaccgattccaagaccggagcgttgaccaatcgtgtagtacattagaccgtcatgggtgcctttttcaagaccgtcgaccgtcatcatcttaccgggttgtgctggtaagtattcgcctaagaattgcttgaagttccgttcaccgatgaaacaaatcccggttgagtccttcttcttagcagttgctaagccagcctcttcagctaaccgacgcacttctgctttttgcatgtgaccgattgggaacattgatttttgtaattgatcttgagaaagagcgctcaagaaataagtttgatctttattgctatcaccgccacgcaacatgtgcgcgatgccgttatcatcgcgttcaatctgagcatagtggcccattgcgatgaagtcagcgtctaattccattgcgtaatctaagaaagccttgaatttcacttctttgttacacatgacgtctggattaggcgttctgccgtgtttgtattcgtctaagaaatattcgaacacgcggtcccaatattctttttcgaagttgacggaataataaggaatgccaattttagaagcaaccttggcaacatcctcataatcttccgttgcggtacagacaccattttcatctgtatcgtcccaatttttcatgaaaacaccaatcacatcgtatccttgttgctttaacaacaatgctgtgacagatgaatccaccccgccgctcataccaacgacgactcgtgtattactgtggtcaaccacaatatcaccatcatttcaaatagattctagttttctacgatttgaaggtcgtgaattccagtacttaccattatagcaatcttggttaatatttcaaactaaaacactcacttttcataagttaaacgtaaaaaagcagtttacctatcaaactcctggtaaaccgctcttaaaacgttatttagccttctttaattaacacttcacgtgccactaagttagcaataataaaattaaattgttcgacgttttcagcattcttttcactcttgaaaatatcgactggatgtaagccatctggagaggtgacagacatcttcaacgtctgtaactctttaccaattgtcatcttcaacttaatcgcactgttaaatggtgaattaggatctaatggccgttccatctggaagttaccattgtttgtgggcacaaagccaacatctcttaatgtgtattttttaacggcgggattgagtcgatattgcaccgtactccccaaaaccgttgctgttgtttttaataaagccatctgcctaacctccatacactgaataagtctattttagcacaagcacgtaaacgctgcctaccccttagcggcttgctttgctaaattgcgtttcacaatcttcgtgagcgcttcggcaaaagcagcgacgtcttcgctcgatgtttcgtgaccaaaactaatccggatgctttcggcaacgcgcgggctatcctcaccatacatcgcgatcaacacgtgtgagggttccaaatcgccagcagtacatgccgaaccacctgaaattgcaaagcctgctaaatcaagattcatctgcaagacataggttgaaacacctttaatccagaggttcacaacatgcccgacttgatcagctccttctgcgttcagcgcaaaatcaatgtcgttggcttttaaatcagctagtaattgctgtttgaatccagcataccgtgcttgtaggtctgctttaaccgctggggccaataattcaactgctttcgcaaaaccagctacagcgggcacattttcagtccctgcgcggcgcttcttttcttgttcaccacctaggacaaatgatggtaaatgaatcgcgtcgttgacatagagaaagccgatttgcttaggtccattgatcttgtgggctgaaactgccagtaaatcgatattgtcagcttgcacatcgatatctaataagccatacgtttgcgtagcatctgtgtggaaccaggcgtttgagtcgcggacaagttcaccaatttcgtgaattggcatatgactgccgacttcgttattgcccatcataatcgatactagaatcgtttcgggcgttaaagccgccttcaaatctgcgagatcaatcaccccttgttcgttgacgggtaagtaaatcacatcaaacccttgcgtttctaaataggccatcggttttaaaacggaatgatgttcaattgccgttgtaataatccgcttgccttctttagcacgcagtctggctgtctgaaggattgccgtgttattactttcggttgccccactcgttaagataagctcgttatctttcgcatgaatgctctgtgccaaagtatggcggctggtatccaacaccgtgtgggcttggcgcccaaaataatgggtgctcgatgcattcccgaaatcggcctgcatctgttcggtcatcgtcgcaatgacctctggggccatgggtgtcgttgccgcgttatctaaataaatatgtttcacaatttttcgcctcattttaaaaagtatctataatagtttaacatagttcgcttttaaagcacggataaacacttttcgctaccaaaaaaggctgggacaaagataccttgtcccagcctttaaaacacttaatctcagattaagcagtcattaaagctgctttttgatctgctgttaatgattcattcatccggccactcttgaaaccagctaaatcaaccgttacaaattcaaaaccagcttgttgtaatgcttggttgatttgttcgctgtgggttaagaagtcagcaatttgtgcttctgggacttcaacccgggcgattgattcgtggtaacgaacacgaaccgttgcaaaacctaaatcacgcaagaatttttcagattgcatcacttgagcaattttggcttcagttaaggctgtgttatatggaaagcgtgaagaaactgaacagctcgctactttattccagttatttaagtttaatgcctttgctaattgacggacatcaatcttataaaaaccagctgtttgaaggacactttctgcgccagcttcgtcacgggcccgtaaacctggacggaagtcgctgttatcatccatgatcatcccatctaaaacgtggtcaaagcctttttcagcagcaatttggttcaattgtgtatagaacatcttcttgctgtaataccatgtttctggtgtgttgttggcaatgtgttcgtcagataagtagttcaatgttgttgtttcgacattcgcgcccatatcatgtgccaagtcgatggctttgttaaattcttcgtctgtgaataattctgagttagcaacgactgctaagacgttttctttgccgagtgtttctaaagccatttttaaaactaatgtgctatcaatcccaccagaaaaggcaacaatcactttttccatttgttgtaaactgacagttaacattgcttttttttcagataatgtattcattgttaaagacttctttctatatcattagattaattgttttaaagctgttaattcattttgaatccgatcggcatacaccaaatcgttgttatctaaactcttgacgatcatcaagtttaaatgcgcggcactatcaacaaagtttttgaaagttgattgactagcggtttgttgcgcgtcatcaaggctaccataaagttgttctgctgttaaaagcgcttgttgcgcttcaattaaactggttgagattgtccccggttgtgaggcatgagcagcgacttcgaataagtcgaccatcatgttttgcgtttgtttaatttgttcacgcatggttgattcctccgattaaattagatgccaaagaaactccgcataaagagtgcggcacatagaccaccaacaaatggtgcaattccgggcacgataatcccgtattgccaatctgagttggctttatttttaattggtaaaagcgcgtgagcaattctaggacccatatcacgcgcaaggttcattgcgaatccggtaggaccgcccatccccatcccaattgcccaaacaagtaacccaactgcgattggtgcaatcccaggtgtcttgatttgtgtaatggcgataattgatgaaatgaaaacaaatgttgcgaaaaattcaacgaagaagttccgtggtaaattccggataccaggtgctgttgagaagatgttacgaaccgcaacaggatcgacattgccttctgatgctttaaattcatcagcgtacatgatatagacgataactgcaccgacaaccccgcccaagacttcagcaactgagtaagggataaacattgcccatgaaacgttgcctaagatacattgtgctaacaccatggctgggttaattgaaacatctccgaaaatgaataatgaaactgtaatcccaaacccccatgttgtaatggcaaataaatgacctgagccacgatactttgaacctttgaggacttcatcactgtgaaccccaaccccgaaaatgatcatgagcgctgtgcccatgaattctgctaataactgatgaatcatgaataaattcctccaaataataacgatttaatatctaaattttgatagctttaacgcgttacatcaggatagacccgactcgggcatactctgataaacagcaagataaacttgattaagtgccacgtcatgcgccttggcggcagctagacaatcgtcgaactctggactatatttttcgagatcgtcatagttcacgattttgacccgaatatcgccgaagcgcgtggctacagtgataaaatgacgtggcataatggtgcgccccatcgtctggtaacgcacaccaacagttgctgtgtgttttaagatcagataagtcatggcttgttgatcggctggatgaatcatgaccgttagcttaattgcgggccgatttttcttcatttgaattggactgaaaaaggcatcgagcgccccattgtccatcaataaatccaaaaccggcgctaaactttctgctgactggtcatcaatgttggcctccaacactaaaatctgatcggtatcggttttaacaacctgttggcttagttttttttttcgcacaacatcacgcgtaatgcattgagttgcggtgtttcccgattaccaaaaccatagccgactttaatgatcgtttgatcgtctgggattggacagaattggtcgacaatcgttttgacaatccccatcccagttggcgtgatcaattcggtctgcaagtctgggttttgtttaattggaatcgcactaccgacgcgcatttgcatcacagcggggactggtacgggcatcatgccatgcgcgactttgataaagccactcccatccgttaattcggatgaatagacttgattaactgccaataattcgagggcgacaaacgctccaacaatatcgacgattgaatcaagcgccccaacttcatgaaaatgaacatcacttgatggtaggtcatgaacgaccgcttctgattgcgcaatttctgtaaaaacttgtttggcgttcgttttaacataatcgcttaaatcactgtgatcgatgatggcttcaatgtcttttaaatgtcggacgtcatcaccatggctgtgcgtgtgtccatttgcgtgttgatgcgtgtgtgcatggccagttgcgtgtgtatgcggatgttgatgctgtgccggtgttgtttcaataaaaccttcatccttgtgcatggcttctggcaaatggacgtcaaaatcggtgccataaatactacttttagcaatccgttctgcatgtaggtggtagccagggacattcaacttagctaattctgtttcaaactgtttgaaatcaacccctaaatcgagcaaagcgccgatgaacatgtccccactaattcctgaaaatgcgtctaaataaagagttctcatttgtcatcctccgtgtcacttaaatgattgatcatacttgctgagtagcccgcaccaaagccgttatcgacattgacgacggtaatcccggacgcacaactattgagcatggtcatcagcgctgttagtccaccaaagttagtgccatagccaatactggttggcacggcaatcaaaggtttttcgatcaacccaccaaccacactggctaaggccccttccataccggcgaccacgatgacaacttgggcttggcgaatttcatccaaatgttcaaacaagcgatgaatgcccgccacaccaacatcatagattcgtttaacttgattaccgtatacttctgcagtgaccgccgcttcttcggccactgccatgtcggaagtccccgctgtgacaacggcgatatagtgatccgtggttggtagtgggtcaaccatcagcactacacattgcgccatttcatagtacattgctgtcggttccgcttcttgaatcgcagcgtacttttctggggaaactcgcgtacataaaatattttcggcatgtcgttttaacgaaccaatgatgccaatgatttggtccgccgttttaccggcgccataaatcacttccggatagccattgcgcttttgccgacttaagtcaaccttggcaaagcctaaatcatcaatggtctgcgcatgtgccagttgctttgttgcttctgtcacactgactttttggtttgcaacagcttctaaaagctgttgtagctcatttgttgtgtccaaactactcattctttctattgttatttcacaataacccctaaaccatcagggatcactgtcactttggcatctgccccttcaatctcgtaggcccgttctaacgctgcatctaaactggttgccaattccatatgcatgtctgtaattaattgtggatcaaccaaatctgacacgaaaatcacatgatgttggaccagaatccgagccaagatttgtgatgtccattgatcagggaccgtttcaagccgtggtgtattgattgcttggtctaagaattctttaggatccttaacgtcagcaatattgtgatagaacccatcaccaccatgcccgtcacgtgcaccagcgaccatgataatcacgccaccttgtttgttcgtcgcttcagcagcagtcatccctttaacggcttggtaaatattttgatcaagtggatagccaccatttgttgaaatggcgatatcacaatcgatcttgtcgacttctgataaactttcaacgaagtcacagccttttttgtgcgctgtttctaaattaccggcgaatgaaccaatgatgtgcttgtcttcatctaaaacaacgttcaagatgaattcaagcccagcttgtttagcggcataaaccatatctttgtggactgggttatgcattaaattcccggttcttgaatagtgggaattgatgaattcacctgagtggttggccataattgttttgtatgaagccacacccggtaaaacagacttccgcccgcctgagaaaccagcgaagaaatgggattcaatgaagccttcagaaatcaataagtcagcttcaacagcgactttattgataatgcaatcgccacctgatggcaattgaccgattttcacaactgagctgtcatcggttgaaacatgcatgacgatttcttcatttgcaacgatttcttcaccatatttgttaaccaattcttcgtgcgttgatggtcgatggaacccagtcgcaactaaaatccgaatccgtgcatctggtgctacagaacgaatccgtcttagtaaaatcggcgtgatgatatgtgaaggaactggtcgtgtatgatcagaactgataatcacgatattctttttccctttagccaactcttctaacttagggctatcaatgggattgtccaatgatttttcaaccgtttcggcttcgctcattggattttgatacgtagcagcttgtgaaacaagcttcccggcaaaattcgcgtctgcaatattagccgtgataattttttgatcgtaaggtaatttaatggctaccaaactataggacttcccttctcaatgctgattgaatgcttttttaaagctacgtccatagttatacagattttctgaaaaggatgcggtataatttatgaacaacatttcattattacttttaggtgtaacaaatgataacaactttatagtcttcaagacgtataatttagattaaagttatttaatgattagcagatataataaatcagcacaaagggtaggcagatgtattatggttttaacagacattgaatttttaattaactttttagaggaacgtcacgtcccagtgattaccaaaaagaagcacacatacttgacgtaccacggtttggaagaacggtatacttatattctgaaaaaaggcgtgattaaaaactcgatcattttacaagacggtcgtgaattcaatctctcttacattacccagccggatgtcatttcacttttacgggatgaaatttcaaaatatacggatcaaccgtttaacgttcgcgttgaaacagaggaagcaactttctatcagattgaccgcgtgaccttctggaactacgtgaatgccacccccgagttacagaattacgttaaaaattactatcgtaaaaaattatccgagaatatttatcgcttgcaaaaaatggtaatgaatggtaaaaacggcgggctgtgtgccttcttatacagcttaattgatctctttggtaagaaacgccgcgatggcatcctgattgacttcgtcgttactaacgaagacattgccggcttctgcggaattagctcgcgcagtagtgtcaatcgcatgctcaaccaactcaaaaaagacggcgtgattgaaaccaccgagcataaattcttaatcaaagatgtcagttacttgcttgataatatcgccaattagcgatttgttaacatatgtaaacatgattcgtgattgaaaacggctatgagacgcgtagccttaatagtcgagaacaaatcagtggaggtttttatgtatgcatattccagataattatttaagtccccaaacgtgtgccgtgcttgcagcggccgctattccagtcattggcttggcactcaagaaagttaaataccaagtcaccgaaaaaaaagaaacggtccccatgttagggatttccgcttcactatcgtttctgatgatgatgtttaacgtgccaattcctggcggtacaaccgcccatgctgttggtgcaaccctattagcgattctcattgggccgtacgccgctagtctagcggtaacgattgcactcatcatgcaggcctttttatttggtgatggtgggattctcgcactcggtgccaatattttcaacatggccattatcatgccatttgtcggctatggtctctatcgactattccaaaaagcacaccagcccaaagtgggagtcgtagttggcgcatatctcgggattaatgccgctgcattaatggccggtattgaacttggtctgcaaccactcgttgcgcataacgcagctggccaacccatgtatgccccttatccgttacacattgcaattccagccatgttgttcgctcatttattagtcgctggttgggttgaagccggctttaccctcgccgtttatcaattcatttgccgggttgcacctaacgaactgttcgttgcaccacgtcaaacagttgatccacaaaccagccgtcgcttacatcacgcgctttacagtttcatcggcctattgactatcttatcgccgattggcctattagctagtggtactgcttggggcgaatggagcgcaagcgaactcgttgcacaactcaaacatgatcacctaggtcacagtctaccaagtggtatggcccatggcttaaactttaatgccctctttagtgactacacagttgctggcgttccactatcacttggctacatcttatcagcggtaacagccgtcattgttttttatcttatcggaaaactggtgatgaatcattattcaacccaatcctaaattaccaacttggcttcaaacaacggaagctacgcccaaaacggtcgcgcaattcgaccgttttttaattcaaaatttgcgctttagtgatcgtttgctgcggcgctttaatcaaacaaaacctcaacctttaatcgcccatcaaacgcctggtattcaactgattagtttattggtgacactcatcattctcgtgttaacccatagtctacttttaatttggttgattggtttattgacgttaattcgaatttgccgcttaccaagccagcatttatggccgctttttaaacgcgtcggtgatatcagtatcattgcgattttattaattctaccgaatttttggctcggccaagtcgccacaacgcttttatttatcgtacggactgaaatcatgttattaaatattgctttctttctcgagacgatcacttggcccgcttttattgttgctttacgtcaattaagactccccagtctgctcattttgacactcgaaattagtctgaaatacagccacttgctcgcccaatttttacaagaatccctctgggcaattcggctacgctcaactggtaaaagccaccaacggcaaaatttagtcggttcactgattggccgcctctacttaagttcccgcaactacattaccgctttatacgatgcgatgattctccggggctacaccggacaagtcacccgacggacgccgctaacagtgaatcgctacgactggcgcttaatcagctgggatctagggctattttgcctattctgtttcattcggaggtaatcagatgctgaatttgcaacacattcactacgcctatacgcaaaccgacagccttaacgacatctcactaaccattcaagtaggcgaggccgtcgcgtttatggggcctaatggttccggaaaatcgacgctgtttaaattaattaacggtttgattcagcccagcgcaggccaatattattttaaagaccaacttgtcgatgcccgcttcctcaaaaagcctgcacaggcgactgccctccaccgcgcaatcggctttgtgttccaaaatagtgacgttcaattatttaacgaaacggtgcgcgccgaactcgcttttggtccagaacagatgggcttagccccagatgaagtgcaaacccgcgttgacgattgcctcgcgttgttacaaatcgaacacttagctgatcgcgtcccttatcagctttccggtggcgaaaaaaaactcgtcgctttgggcagtgtgctaacgatgaatcctgaaataattgtgctcgatgaaccattcaacggcctatcagccgcctaccaaacgctgattatccacttgctccaacaactcaatcaagccggaaaagggattttaattgcaagccacaacctggctcaagtcaaacaagtcgctaaacgggtggtcgtctttaatgaagaccatcaagtgacccatgacttaccactcgcaaaacttgaacaagaaccggaactacaacgaactttagcattactctaaagagagtgtgttgtagttactgttaatcgcagacatataactgatagcacaaatatgcggatatcaaaagcggcggatgacacaaaaataatttttgtgtcatccgccgcttttgcattttatattaatcgccttcgatttgtaactatccctctgtcgcattgaccgtgattgactgtccaatcgggaagtagttcattgctgttataaccaccagtcaccgctaaaatcgctttgacattgtcatctatgaaagcagcgtgcaaatcggcaatccgcgcttcaattggactagaattgaattggtccattaccaagacatgctgcccaaacgtcacctgataaccaagtgcactcaatcgatcattcgccggttgattagccacatatccgccaacactttgcaaactattactaggcgcgatgacccgaatctcatcaccttctgacaatcgtgtaggaatcatcttaattcacgcctctccgttaccacttcaaaacgctcacataaacaggcaattgtcggcgtaaacacctgccctgcctctgcatattcagctttaaaaaatggctcgtgaactgaacgccaataagcaagcgttcgatcactctcgccctctaaaaaggcatgttcagcgtcgacttgatcatacttaacaatcgtgcacattatcgttttcgtaattgcaaccggccggtctcgtccatctaaaataacattataatcccccacttgtgggacatgctcatcgggttcatacaacttaatcgcagaagtggtggccgttttttgaccgattattaccaatcgtgccaattcattggccatttgttctgtattcccaaatgaataaatctccgctggttgtaaattaggtgataactgttgctgttccgtgaattgttgccaataccgctgcacctctggtgtcattgacatcccctcttccattcgtaacgttgttgttagtttagcagaatttaaccatttaaccaaaaaaagaaacttacccattaggataagtttcttttgatattttatgcccaccgacgcatctttttaagcatcatcggatagcttttaattaggaaccattgtttcatcttaccggttgtttggtcggcacgaatcccagcaatccctttttcaagcatctgttcaaaagtgattgttggttctgtccactgaccatcaacgtaacacagttggcaatactgatttgacttggtgccatcttgttcactaccttggttttgtgcagtcagtggcatgccacaactttgacagaatttttccatgttggactcctttaacgtgcttttcaaaccatgttcctacgtttagcctaattagccaaacaatcggcttcgccgcttattcgtctaattttgctaatcctcagaacataaccagtttgaacacacttattttcttaacgtgctttcatcaacagtttcctgcgctttgctacacttatcaaatcatcgactatgtcgctaattcgttaagttatgcaaatgctcagaagctaaccgttgatgacgcacttcttttatttaacgtgcttttcaaaccatatgcctgtgcctagcgacacaagtcaaacgattgcttgcagcaatcattcgccttgttgggctagtgctcggaatatacccggtttgaacgcacttcttctttaacgagcttgaacgcactcattttatttaatattcttcaagaagttaagcaacattgctgctgatttttggcctgcttctacgatgaattcgtcaaacgttacgccggcttcttcgtcgccgacgtcgctcattgcgcgaatgacaacgaatggaatcttgaattgcgttgcgacttgaccaattgcagcgccttccatttcacaagagagcgcttcggggtaaatttctttgattgccttgattttatcttggctcgcaacaaattgatcaccggtgacaattaaaccaacacgtggttgtaggtcaaccgctttagcagccgcttcgatttgttgaacaatcttagcatcactttcaaatcgttggggttgttgtggtaattgacctggtaagtaaccaaaggcagttgcttctgcatcgtgataagcgacttcgcttgaaatcacgacgtcgccgacatgaaggccttcaccaatcccaccagctgaaccggtattaatcacaacatctggtttttcttcggctaataaaatcgccgtcgtcatcccagcttgcactttaccaattcctgattcaaccaacgtcactttatgaccgtacaattgacctttataaaaggtattgccagcaaccgtgtgttgttgcacatcttctaactttgttaaaagcgtccgaatttcttcttccatggcgcaaatgacactaattttcatactaactctctccattctaaaaaaacattaactttaccattctataggaaaaaaagaatcaagtaaacgataataattaagccaaaggtaatcccaatcgcccaattcaaccgtttcttcattcgtttaaccgctggtggatcgactttcttagtccgacgcgttgctgtttctggttcgtcttcagtcaccgctttaagggcttctttttgttgttcacgtgcatattcacgttctgtcctgaggcgctcttgatcgcgctgtttaaaggcggcttcttcagcctctttttgttgtcgatattcttcgcgcgtcttaggttcattcgtcatttctaccgctcctattttgcttgtaattgccagtaatacaacgccataatcgttttggcatcacagattaaatcatctgcaacggctgcttgtgcttcttctaacgtcaacttttcaacgttcaagaactcatcgtcatctagcgagcgcttatgcgtgaccggcgttagtgtatcagtgtagtataaagtcattaattcatttgaaaaaccgggtgatgaaaagaaatccgtcacgtgcacgagcttttgcgtcgtcaaacccgtttcttcattcaattcacgtagtgcgacctgatctaagtccttttcacctggatcaatcttcccagcaggaatttctaacgtttcacgttgcatgggggcgcgccattgtcgcactaaaaggatgcggttatccgccgtaatcggaataatgccaaccgccccatgatgatagacaatctcgcgacttgcggtttgtccatttggcagtgccacttgttgaacggcaagatcaatgatctggcctttgaataatgtttcttccgagaggaccttttctgtataatccatctgctaatgccacctttaccgtttaatcgctattatacgcgcatttaaaatcgtccgccatcgtcaatgctaaattcaggttcacggccgaattaaaaatccatccttaggcggatactcttttaccttaattcctgttagaatgaaggcatcaattaaatcaggagctgacaattatgtttaaaaaaataacgatttggtgcacaggcatgctcattacacttgtctcaatcccaattttggcaacatgctttgatatttatggtgattgggataatttcctctggttcagccttggtttattattagggctgatctacgttacaatcagcctcaaacggcttaaacgacaaccagaatataaaaaagatcagcatatttcaccacaaatgctgaaacactaccaagatgctggcatgagtgatgacgaaattgactttttcagacaaacgatgcaacaagccgaagcgcaaattaaggtacttgcaaccaacatgcaagctcttcctaaattacgggcaatcgatttaaatcacgatacaaccaaggtcagccaatcgctttttcgtgcgattgtgaaagatccaaagcggcttcacaatgctggcgactttttataccggcacttaccatcaatcaatgaactgactagcaaatacatcgaaattaaccatcatgaagtcaagacagccgatacctatctcgttttagataaatcggctgcggcaattgatgcgcttagtcaacagattcaacaagactacgcggatttcgtggccgaagatgtcgatgacttagacacagaagtctccgtcgctcaacaacaaatcaccccagatcacaaggaggaagactaatgtctgaaacgcccaatccaacaaacgatttaatgaatgatttattaaaagatcctttcgaccaaagtgcgccagttgtcactgaggaagcagccccccaggcagaggcctcaattatcaataagctctcccctgaacaacaagcacaggccgaacaattggcacaacaactggacgtcaacgaccaacaagccgtcttgaattacggcgctcaagcccaaaagaaactcggcgctttctcccaaacaatgctcaaccaagtccaaagccaagaaacaggcgaaattggtgacgcattaacgtcattgatgtaccgtttaaacgaagccaatcctgccgaattacgcgccgaagacagcaacgttttcaagcggatgtttggcaagattaagaagtcggtctatgaaatcactgcgaaatatcaaaaaattggcgcccaaattgatgggattgccgttaaattggacaaagaaaaaaatgcattaatgcgcgacaatgagacgcttgaaacgttgtatgcgaagaataaagcctacttcgatgcactcaatatttatattgctgctggtcagttgaagattcaagaattagaaacaacgacgattccagaagccatggaacgcgccaaaaatgacgataatcaaatggtcgtgcaagaagttaatgatctcaatcaattcaagaaccgcttggaaaaacgaacttatgatttagaattagcacggcaaatcacgttgcaacaagcaccacagattcgcttgattcaaaataccaaccaagcattagctgaaaagattcaggcttccattaacacggcgattccactctggaaaaaccaagttgccatcgccctcaccctgctccgtcaaaaagatgcggtcactgcacaacgacaagtgtctgaaacgaccaatgacctcttgaagaaaaatagtgcgatgttgaagatgtcttcaatcgaaaccgccaaagaaaatgaacgcggcgtcgttgatatcgaaaccttacagaaaacacaaaatgatcttgttgaaaccttacaagaaaccctcaagattcaacaagaaggccgcgaaaaacgccaagtggctgaaaaagaactcaaccacatggaaaatgatctgcgcgaacacttattggcctatacccaaggtcaaaccgctactaacagcggaccaaaagaagttaattaaatccacaaaaatagcgccgcccatctttttgatgagcggcgctatttttgaatagttaagctattttgcgatgtttcaacatccgccaaccggttagagccgttgcgattaaacaaatcactagcgcaaccataaaggcatcatgcatcccagcgatgaacacattcgcgtgacctggaatataccccgtcactttttgcccgtaattgcgactcattgcggcatataaaaccgtcgttgacaatgaaatcccaaagaccatcccaagattccgcgcgagggcgttaatcccaccagcaatccctagatcttcaacaccgacggaactcatgacaatcgtgttattcggtgcttggaaaatcccattcccaagcccaactaagccaacgaagaacatgaataaccagatcggtgtttgtagattcatcaacatataaccgacctgactgatcgaaatcaacactaacccgataaaggttaacatttctggcccaattcgatccgagatactcccggcaatcggtgcgaccaccacttgaacaattgggaaaatcattaaactgtaaccggcaagattaggcgctaagcctagcgcattttccagatagaatggtgaaatcacattgaagaagaagttaacgatgaaaattaagaacgcacagagtaaactcaaactaaaatcgatatttttaaacaatctaaacgataataatggctgttctacatgttgttcaatccaaacaaagatgccagcactaattaaggcaacgacaaaggccgctaaaataattggtgaggtaaatccaatttgttggccgatgaaaatgccgaggaataaactaacaattaaaactacaaaactggcaaacccagcatagtcaattttttcatgtgttttaacaatatccttcggtaaaataaaatgcccaaaaataatggttaaaattccaattggcacgttaatccagaaaatatagccccaactaaaatgcgctaagattagcccaccaatcccgggcccggcaatgctacctaacgcaacgaatgatccggttaaccccaacgctcgcccacgctctttcagtgggaaaacctcggtaataatcccattattattgctcatcgtcattgatgcccctaaagcctgaagaacgcgtgcacctaataacaatggtaagccgccattaaagccacacaacaaggaaccaatcacgaataagagggttccaattttaaacactttgaccttcccaaaagcatcgccaattttaccgaataataataataaggcacaaatcataatcagataaatcgacacaatccattccgcttgattcatcggaatctttaaatcacggctcatgactggaagtgcaatattaacgatactgccatcaagcgtcgacatgaaggtaaatagtccgacagccgtcaatattcgccaacgatttttttgaacctgcggattatccacataacttaatgccatctgtgagtcactttctttcttttaagtttactccgtctattataccgtggttttagttaaaaataaaaaacttcctcaatcaaaaataattcctgattgaggaagtttccattacttcgcttgattttttctatagcgccaagtaacaacggtaaaaccaatcacaatgctgataattggttcaataaatgaataagtcgcaaacggtacatagtcaattggattaaccccgagagccccagctatgaagatcccactaacgccccatggtactaaggcgttgactgcagaaccaccggcagaaagcgttcgacttaaatacttacgatctaatggcaatttatcatatgctgatttgaacgtttctcctgaaagaataactgacaaatattgttcaccaaccaagaagttaatcccagtcgcactcacaatggtcatcataatcagcttcccaggtgtgttaacgaactgctgaatatttgtaatcagcacttcaaccacttgatacttaatcagtaagccgccaagtgataaagcaaggataatcaaggcagctgaatttaacatacttgccatcccacctcttgaaagtagcacattcatttggcgattacccgtctttgcaacaaacccattcattagcatgtcacacaatacttttagactgtaatgctgtttacttctaaaaagtgtgataaacaaagcactaaatgaactggttaataacgacggaattgcaggtacttttagccacgcaaaaataaacaagatgatgacgggtaaaatcgcccaaaatgagatatcaaagtgcgtcatcaatacgtctgccatttgttgaatgccggccatattagctgatttcgagctactaccgaccaccacataaaagacgagcgagattagcgctgctggcagtgccgtttccgccatacttttaatatgatcataaacatcaatcccagcaattcctgatgctaaattagtggtatccgacaaaggtgagagattattccctaaaagcgcacctgatacaatggcgcccaccgtcaatgcggttgaaaaccccaatatatgcccaattcctaaaaaggcaatccccattgttgaaatggttgtaaacgaactacccacggtaatcccaatcacagtacacaataagaaaatagttggaataaagaatttaaccgataccatcttaaacccataatacataatcgttggaatggtcccgctagcaatccaagttgccacgagcacgccaatcagtaaaaagataataatcggaataatccccggtttaatcccttcaactatgccatcatgaatttcatcccaagaataaccacgaaacttgccataaaataagagcactgtaaaaaccattaagattggaatatgtggtgtcatcttgtatttaatgattaaaataccaagacaagctaacatcccgaccaaaatcacaattgattccagtaaactcgttgtatgtttctttttttcttgtgtcatttgaacaccctctaacttattcaattgtcaaaactatcaaaaacggtcagacttttaacagctgaccgtttttttgaaactatttttgttgatgtctttttggatgtcaattaaccattgatcattcttatatttactaataataaatggaatgatagtgaagataactgaaatgataacaaccaataatgattgtgacaagcttgttgtgaataaggttgcaaagacaataatcgcaatccctaaaatcaacgcaattgaaacagcccatgcaagaccgttcctttttttaccaatgcggtatggacggtctaagtctggttgatctttacgtaatttcaagacagccactgcgattaataagtaaacaattgcatacaagattgttgttgcatttgttaacgttaagaatacgccgttgacatctttcatgaaaccatataataaagcaaataatgaaatggcgattgtttgtgttaaaacaacattttttgaaacaccatattggttttgtttgtggaaacctaattttgctggtaaataaccatcacgagcaacttggatgattgtctttgaaggacctgttacccaagctgataattgtaataacacaccaatgaagaccatgaaactgaagatgttggcgatcattgttggccaaccaagaatttgacaataaattaagattggctgtgtaatatttgaaagttccattttacccattggtacaacgttagcaactaacattgcgtttactaagttcaagacaactaagccaattaatgaaacgaaaatccctttagtaaaagtttttgatgggttgtgtaaacgtggaataaagacagatgacatttcaatcccagtaaagatgaatgagataccagccatatatttcaatgatgataaaccatctttagttggaattaatttgcccattgagaagtgacccaatgtaccgccaggcatgatgccgtttttgattaatgcagcaatccccataaccgccataataacgattggaatataaacacctaaccaaacaccgatattgccgccgactttagccatatcatattttaagcttaataatgtgataatccagtagaacacaaggatacaaccaagaacaaaccagtggttattccctaaagttggattaccaaatgagttacccaataaaggtccgattgttgaagcaaccattaccatccctgggaacatttgtacccaaagtaaccatgctgcaacgaaacctaatttactacttaacgctgttttaatccaaagttgtgggccaccttcttcaggcattgcagtccctaattcaccagcaatcaaagcaattggtaatgcaaagaacaataccgcaaagattgaataactgatttgagcccagcccgttgcagctaacgtaggaatactacgaacagttgcacataaagccatcgttaaaccaataaaggttcctaaggcaattttattaacttgtttattttccatttttacttttcctccgattttatctcacaataagaaagccgcttgcgcggctttctctttttactaaacaattacttagaattatttacgatcttcgtaaattgcttctaatttttcttgcatagcttgtttgatcttaggagcaaagtaatcaaagttttcttctttgttcatgtatggtgtcataacagcggcacgaagaacagttactttaccagcttcttcccagccttcttcagtaacgcctaagttattaacaaacttgaatgggctgttaccataatcaggaatagcgaagtcagtatgtgatgttaggtattcgttaccatagatgctaccagttacatatgaagcttggttgtagaattcatggtttaattcgttcatttctacaaggttgttgttaccttcttcttggaagacatagtcaaccatgttgaagtcaggatctgttaaaggatgaacttcaattgtcttgtcgccaactttaaattctagaccacttaagaagttgtagaaacgacgaacaccttcgattgaagcaccaactaatttaccataaccagtaacgttcaatggtaatgttttatgtgcagcccatactgatgcagcagttgcgccagcttttgaaccttcaagaatatatgcacccaataatgcaggaatatctgcacctttttcaaagacgtatgttgcgaagtatgaaatcacgtcgcgcatgcgaatatcttggatggcaatcccaccagctgaataaggaatgtaacccatcttatgtggatcaattgtaactgattctgcttctgggaatgcagcatatgcattgtaagtatgttctgaaacaaggttttcttcttcagtgaagacattgtattcagcaaatttgctttgtaggtctttgtatgaaattaatttgttatcttcatcaagtaagatagcacgaccataaccaccgtaagcagcatcaacgtggaagtagaagtagatgccttctttaacaagtttgttacgtaattcagcaatttcgttgatgccgtcaacagcaccttcttcagttgagccaacaacgccgacaaccccaagaattggtgtttctgtgcttgctaattcacgaacgattttttctaattcattgatatccatacggtaatttgaatcaactggtactgggattacttgatccaaaccgataccgataatatcagcggcttttaaccatgaataatgttttgtttgtggaactaaccatttacctaacttgtcaagatctttaccaccacgagctgatttagctttgatttcatcaatcttgtcgccgttagcttcaactaagtccatgatttctttagttgacatgtttgataattcccagtctgtcttgcctgctacaatagtaggatcaacagccttcattgcaaatggaagtgacttgatgttacgtgcataccataaaccttccaagttagctaatgaaccatcagctacgatgtggccccaaccatttgtgtaacccatcaatgttgcaaattctaaaccaacttcttcttccatttgtgaagttgctggtgatgattcatacgcaacgttattaccattccataacattgcatagttatatgccaaaatggctggcattaatgtttctgagttcatatgaccccagtaacgaccagcattatgtcaaggaactgattgtgaacgtaaaacgtgctgaaagttcgtctaaaacgtctttcatgttgttaaccgttccttggaattcaggtgatgtttgttgttcagctgaaatcattggtttgtcttgtggcatgtagttttgacgccatccaagatgttcgtcaaccaacttacctaacaaatctttgtaaagttgaccattttcagctttatcaccgataaatagagcagataaatctgtatcttttgcactaaaactattgttactcataacaaaaaatcctcctaaattgtagatatagtataaccccaatcaatagaatacgctcattgtccataaaagcaaacatatgaaagcgattccgattttttagagtacgaaaaatagccgtcaaacaacgtttgacggctacctttgcagttgtattttggggttatactatatgatctacattcacgaagaacccagtaacattcagtatagatacaaaagccttcatttaatttttggaacgtctctagtcagtaacacgtgctaagaagtaattcttcttcccacggcgaataatcacaaacttgccatcaaagctagtcatcgggtcaatcatcgcatcagtttcttggatacggtcaccgttaattgtaatggcaccattttgaacatcttcacgtgcttgacgttttgaagattcaatacctgtatccactaagaagtcaacaatgtttttagcttctttactaatttcaactgatggtgctttaccaaaagcttgttctgcttcaacaacatctaaagctttgatattaccttcaaaaagtaattcagtaatatgttccgcttcatctaatgcttcttgaccgtgaacaaaacgtgtcacttcttgtgctaaacgtttttgtgcttcacgtttttcaggttctgttgcaactttttgtgccaattcttcaatttcgtcttcttctaagaatgtgaagaatttaaggtatttaataacatcacgatcatcttgatttacccagaattggtagaattcgtatggtgaagtcttttcagcgtcaagccagattgcaccacctgctgtcttaccaaacttagttccgtcagctttcaacattaatggaattgttaaaccgtatacgggttcgtcgctaccttcaagtttatgaatcatatcaatccctgaagtaatattgccccattgatcagccccaccaatttgcagttggatgttatgttcatcatgtaagtgtttgaaatcaattgattgtagaatttggtatgtgaattcagtaaatgaaatccccacttccaaacgactagcaacaatatctttagctaacattgtattgatgttgaaattcttaccgtaatctcttaaaaagtccaacaatgagatttttgataaccaatcgtagttattaacaaaagtaacattggcatctttaccaaataatttccgcatttggtttgataaagcttcaacatttttttgaaccttttccattgtttgtaactggcgttctgaattacgaccacttggatcaccaattgatcctgtcccaccaccgattaagatgtatgggtgatgtccagctaattggaatcgtttcatcatcatgaatggaatcaaatgaccgatgtgtaaactatcaccagttggatcagccccacagtataaagaaatcttgttgttttctactaattcacgcaatccttcagcatctgtttgttggttaatcgcatcacgccatgttaattcatcaataatattttttctcatcaaaatttcctcctaaattaaaaaagtcccagtaatctttaataaaataaagattactgggacgaaatgtcatttttccgcggtaccacccgtgttatattttgaaagtgcactttcaaaatatcactctagattttaacgtaaattcaacgtacgatttgataaaacaaaaagtgtaattcgacttagaaacatatgtcaggtctcaccaaatcccgactctctgtaatagtggttactaattctactgcgcttttcaatcgctttattaacttatgtgcttatcatagttcacatgataaatgaagtcaacacttttatgctatttttttataaacatgaacgattttattctaatttaaatttaattaaattagaatagtcgtatttaattcctctaaattaaagttttacaacattcgcagcttgtggtccacgtgtgccttcaacgatgtcgaattcgaccgcttggccttcttctaatgacttgaagccttcgtcttggattgcactgaaatgtacaaagatatcgtcttgaccttctgctgagataaagccgaaacctttttcattgttaaaccattttactgttcctttttccatgatgttactcctttaaatacacaattattatctagccaccagaatcggtcatctaaacaagtcaattatacgcgattttgtaaccgcatgcaagcgtaaaataaattaattgagtttatatcgggtccgccgttgatattgttcgccaggatgcaaaacaatattaccaaactcggtatgatggatggcatctggcatcatttgggcttcaatcgccactgcttggtggggttgaattgcctgatttgttaagtttggttcgtccccgaagccattggcggtataaataacgattgcattcccttctgtatcaattgtgatcgagcggccactttcgggatcgcgtaaaatcgcatccgctttacccggcgtttgattcaacaggaatggatgatcaaaaccaccgaccaatttagtttgcgtattttcactatcaaaagcggcttgcaaagctcgcggttgacgtaaatcaaagacagagcccgcaactgggactaattccccggttggtaagccgtctggttgaatggcaccaaaacggtcactatcgatttgcaatgtgtgttggccaacaaattgatcaaagtcccccgtcaaattcagatagacatggcatgttgggttaaacaacgtggttttatcagtcgttgcttgatagtcaattagccattcattggcctcatttagcgtatacgtcgtggtcaccgctaaattaccggggaatccattttcaccatctggactcgttaacatgaaaacgacactaatcgcatcatctttttcaaccactgatgattgccagatttgcgattcaaaactattggggccaccatgattcgtgttggcgccattattaatcggtgcttgataatcatgaccatcgagtgtaaaagcaccttgaccgatgcgaccagctacgcgtcccactgtcgcaccaaaataagcttgttgctttacaaaatccgctagggtgtcatagccaatcacaacattggccatctgaccactttgatccggcatcaccaagtgagtaatcgttgcgccgtattctgtcacggctaattgatacccctgacgattctctagccaatactgccaaaccgtttgaccatttatttcgccaaatgcttctcgccaatacttcatgaatgttcctccttataggttaaacatgttgcgtaaatttaataaatgctgcctgaccttgttcgttgcatttgaaaacaccagcgtcttctagaacgcgcatgaacactttgccgacttcagtccgcactaattccgttacgttatctgatgtaatcgatgtgttagcggctttaatcgtatctgcccattcttgatggtaagcggccatctggtttggttgatcgcagagatagtgttcaacctcagccatttcatctttgagtcgtggtggcaaaattgctaagcccatcacttcgattaaaccaatattttcttttttaatatgttgcacatctgcatgtggatgataaattccatctggatgttctgcagacgtttgattgtcgcgtagtaccaaatcaatttcgaattgaccgtctcgcatccgcgcaatcggcgtaatcgtatgatgtggtgtgccgtcttctgagtgggctaagatttggacacttggatcgctgtaattttgccaactagttaaaatttgtgcagcgagtgtttccaaatgcgttgcattcgcactcgtcaaacgaatgactgacattggccacttcacaattcccgcctgaatatcattatacccgttaaaatgtagtggtgtctcgattggcgccttagccattggaaaatcgtgacgacccccttgataatgttcatgggttaagatcgaaccaccgacaatcggtaaatcagcgttactcccagcgaaatagccggggaactgcttcacaatctgtaataaatttttgaaggtcgtttcattaatcaccattggttcatgttgaccatcaaggaaaatcgaatgctcattaaaataagcatatggtgaatattggaagccccaagtctgacctgccaatttaaaacgaatgatgcgatgattacgccgtgctgggaaatctaaacgccccgtatacccctcattttccagacataattgacatttggggtagccggtttgtttcatcgttttggctaacgcaatttgtttcgggtccttttccggcttcgataaattaatcgtgatttctaagtcgccatattgcgtcggcacttgataagcgatatttttcgcgattgcggccactttaacgtagtcgttggcccgacttaattcataaaagtcggcaagtgcttgttggggatcactctcgtattgatgccaaaaatggcggttcaccgcacttggtaatggcgtcaccaaatccatcaacttcgcccctaaaatatcttgttctgccgctaaattctcaatccggctattcgcaactgcaagacgcaacaacgcgtcctttaatccgatgagactttgatcagtcaccgcaacgttactgtcctcttcaccaacaaggtctaagacgagattaaataagtactgttggtcttctgctttataaagtgtgtcttgaaagataatcactttttcaataaatgtttgaatcaattctcttgcttgcatatgctttcctctaccgatctgcgtatcctgctggatgatttaaatgccaattccaggcagtttcaataattgctttcatattgtcatactgtggcgtccaacctaagacttcgcgtgctttgtcacttgcggcaatcattatataaattaattaaatgtaaatagctgaaattaacggtattgacaaaaaaatatttttaataagttttaaccctattaatatttttttattgaaattcgccaagtttgtgatgtttttatttattaaatgaccttttaatcgcgatgcagtttacagcttgtagctttcagccgtttttatagttcaaataataattatattgataagaaaatatttatttaaagctatcgttttctactaatggtttaattccttaaaattgatgcaactttttttgaatagtgctaataattgtcgctaatccattggctaaaccagtcataatgaggtaaataatcaataatcgatgtactttttgaacaaaaaaagaccgctatctaaagtgatagcgatccttttttaatccataatgcccgtggcaggattcgaacctgtacttggttacccaaacagcgacctgaacgctgcgcgtctgccaattccgccacacgggcgattgtgctacaagactattgtaccagtgttacagagccctgccaatacccatttattaatatttcgcttataataatagttgataagggagggattcagatgcaagtcatcacaaattcaaccgttcgtgcggtcctgcaggcacggcctgccatcagtcataaaggcgattttggccgcgtcttaatcattggtggtagtcagcaatacggcggtgctgcgattatgagtgcctgtgcggctgtttatgctggtgctggattagtttccgttgctagtgacttaagtgttctcagcggactgcacgcgcgcttaccagaagccatgttcattgattatcaacaacccttcgtgcagtggtcgtctgcagtccaggctgctgatgtcgttgttgtcggacctggtcttggcattacttcgtttgccgttgaactgctgagaaaaatcttacaaaccatccaaccaacacaaacactgattatcgatggttcagcactatcaatcatcgcacatgaaaaactgacgatcccgaatacgcaactcattttaaccccgcatcaaatggaatgggcgcgcctcagcggtgttgcaatcgagcagcaaacggttgctgctaatcaagccgcactcgctgcttatccaaacgcgactttagtgcttaaaaaacatcacactgaggtctatcatcagcaacaggttcagcaactaaccatcggtgggccttccatggcaactggcggtagcggcgatacactgactggtattattgccgcattctgtggtcaatttggcacccactatcagacgatttgtgccgctgtttatacccacagtgcgattgctgatgaactcgccaaaacccaatacgtcacacttcctagccaagtgattcagaccttaccacactatatggctaaaatgattcatcaatcttaaaaaaacagcagtccttttgaaagggctgctgtttattaattcgctttaagtaatgcaagttctgcatctgtcaacgcacggtattggccacggtctaaatcatctggcaatgccagtggtcccatcttaagccgttctagcgtcaagacttccttgccgaccgcatgaaacatccgcttcacttgatggaatttaccttcatgaatctcaacggtaatctgactttcttgttgcgcctcatcaacactcagaatttcaagctgtgctggttgtgcagtaaaatcactcaacacgagccccgcttcaaaccgcgcttgatcctctgccgtgacaatcccggcaatcgtggcacgataaactttactgacatgttttttaggactcaacaaggcatggcttaaatcgccatcgttcgtcaacaacaataaaccagtcgtgtctttatccaatcgccccactggaaacagatcatcccgcaagtccgctggtgccaataaatcaagcactgttttctggggatcagtcgtcgccgaaatcacacccgccggtttgttcatcagccaataaaaataggtttgataacgcacgggttcgtcgtcaacatagacaacggtcgcctcgttcactttgaacttcgcatctttgaccacagtcccatcaacgcgcacgcgtcccgctttaaaaagtacctttaattctttgcgtgaagccacattcatatgacttaaaaagcgatcaattctcatttgattctcaactttcttctaaaccgatccaagttactcccaatgacatagtccgctaagcgcgatttaagcaccaatgcggcgtaaacagccacacctaggccaacgctaatcattaagactagaacgctctgaagacggctgtacgggttaaagacaaggtataaccccttgactgcccccgccgttaccaaatacatcaccaatgagaagcctaaaacgccgattaagcgccgaatggttttgcgtaatgcaaagtgataatagcgatgcagtgctgcaatcattaaaaccgaacttgtcgcaaaggctaagccggtcgatactagcgggccatagacacggaaaaaataaatcgctgggtactgcgccacaattttgacgatgaatccgatgaataagtaaaacaatgccaagcggttctgatagaggccttgtaagacagcgcctaaaaccgtaaagaggccgagcataatagaaatgtaagatgaaaattgtaagacactaatcccaagcgtatcatgcgcgtagaataacgtgtaaagcggaccggcaaccgccgccatcccaaatgccgctggaatcatcactaagttgaataattgcaaagtactgccgatttgatgttgcaattctttttgattgccccgcacatgcgcagctgacatcaatggaatcgccgtgaccgccatggcagcagcgagtgaaacggtgattgaaatcagtttattcgcattagctgcaaataaagcatacaagttatacaactgatgatcactggcaaccacgaaatcatgcatcatcggattaaacgtgtattggtcgatgatatagaccaagttgacacttgcgtcgattacgatgaatggaattgattggcgcacaatcccttttaacaagtcagtcgttgacacttctaattcgttgttactattggccactaactctgaaatgcgaccgcgttgtttcaaataatagaaaatcagtaataacaagccggcagcagccccaatgaatgcggcaaatgtcgcctgcgtcacagcatccacgtagctgcctttaaacacttgcataatcataaaagcggtcacggtcatgtacagcacgcgggctgcttgttcaataaattgcgaaatcgcagacggcgccatttcggcatagccttggaaaaagccccgcataatactgagcaatggaataatcaatagcggccagcttaatgaccggaagaccggtaccatccgcggatcacccgctgctagaacgggcgctaacgcaaagagtgcgagcgctgataaaacacccattgccaacattaaaatcagcgactttctgaaaagacgctgaccaatgccatactcattcatttcgttatagcgtgcaatttgtttcgatagcgcccctggaatcccagccgtcgagatcactaaaaagacactataaatttggtatccttttgcaaataatgtgttggcttgtaagaaattcgcgccaaaccagattggccacggaattacatagacggcgcccagaattcgcgagaaaatactcccagcggtcatccaagcggagccccgtaacatcttactttgtgaagatctatccgtcgcctttgtttcaggtgaattggtcatttcccataactcccttattaaacgtcaaaaagcatcttcctaccattttagaggattgccccaagccttgcaattcctttaacaaaactttatgaaaaagagtgcttctgatgacggttagcaactgagcattaatacaaaattcccaataatccaggttttaagattattgggaattttagattaagcggaagttgttgtcatcagaagcacgtttcaataagagtgctattagcgcttgcccagattttgagcactaaactaaaaacgggaattatggcgtactcggccatgattcccgttttgtagttaggcgcagaaatctagcgccaatagcacgtttcaaaaaaagagccccgccttcgcggagctctctgccatctcattatttagcttgtttactttgttgaatcaaataccacgtcaacagaatgctgacaaaaaccatgataccgccaaagattggtgtactgtctaagccccaagctgccgatgcttgcccgccaactaatgagcctatcgtaatcccgatattaaaggctgagatattcaaagccgaagccaatggaatatcatttggcctgattttttcagccaactgcacaatgtataattggagccctggaacgttcatgaaggcgaaaaagcccatcaataaaacgttaattaaaccgaaccaatgggcatttaacgttaacctgaatagcaacaaggtcactaacaagccaacaaacattttcaatagcgccatcaacggttggtgatttgaccatttgccacccaacgtatttccaaaagccaccatcagaccataaataattaagatgatcacaacggcccttggtgaccaacccatttttgattctaaaatcggcgttacaggcgaagactggcgcaaaagcgaccgtcaagttaccaatgataaagacaaccataatccccaacaataaatttttccgtggccaacgacttgttaaaatcgccaaaatcggtgccccaatcgtaattcccaaagcatacatcgatacggttagtcctgcttgactcatcgtaatcccaaaatccttaatcatcaatggcattaagccgacactgatgaattctgtcgaaccaatcgcaaaagcactgattgccaatgctagtaatgtgaggttcgcccgttgtttactactcatactgccacactcctattagactttttttactgatgtactatattattcaataggagcgtgattttcacaatcacgcactttttagtcagtaggttactgaaaagtaataattgagtcttatcacaatgaaaaggtgaatcaaaattagaaatgaatgagaaaacatataacattggcgttgaagctacgatggaaattatcggcggtaaatggaaacccgttattctttgtcatttgcgcaaccaaccacggcgatcaagcgagctcttacaacgcatcccaaagatttcccaaaaggtgctcactgcacaattacgcgaactcgaaaacgatggcatcatcaatcgtaaaatttatcaagaaattccgccccgcgttgaatacagcctctctgaatacggtcagtcactcaataaaatcttaaatctcctctgtttatggggcgaagataacattgatcgccgccaaacagcgggtgaatcaatccaatcgaataaaaaaaggcagccaactaggctgcctttttgcttgtcatgatttttgccgaccaaatttcacgaaataaataaccaccatgatcattaagaaaattaaaccaacaatgattgaaatccgcgtttccggattaatgaacatgaagattaaggtgatggctagcatcgccaatgtaatgtagttcgaataaggtgaccaaggcatcttaaatggatgttgtgccatcttgtcagcgtgttgctttctaaaggcaatttggctgattaaaatgacgaaccatggcaccatccctggtaagacacttgagctatacacgagcacgaagacattgccggctttaggataaacgagtggtaaaatggcgtttaaaatcaccccaattaaaatccctaatgaaatcgcaccgaccgcataaaatgggacaccgtggcggtttaattttaagaatcgttttggtaactgcccattattggccaacgtaaacgtcattcgactggcactgtaaatccctgagttagcacccgataaggctgctgtaatcactacgaagttaatgattgatgctgcagcggtaatcccaattttagcaaaggtttgcacaaacggtgacccgacctgactcaattcgttccaaggataaatactcaagatcacgaaaatcgccccaatatagaaaatcaaaatccgtgcaaccgttgattgaattgctttgaccaatgttgattgtggattttcagcctcgccagccgtaatcccaatcaattcaatcccttggtatgatgccaagacaattgccaaggcaaagatgaagcctttaaagccccccgtaaagaagccgtgcgtccataaattactgatgccgactggatgcatatggttcccaatcccaaaaacaatgagacccaggcctgccacaatcatcagaataatcgtgacgactttaatcagcgcaaaccaaaattccaattcaccaaacatgctgactgaaattaagttagccgcacataagaacgtaatcgcgaccagtcccggtacccagcccggcaagttcggccaccagaattctaagtaaccgccgatggcaatcatttcactcatccccacgacaacgaattggaagacgttgctccacgctgttaagtaaccaaaaatcggatgcatatattccgttgcaaacttggcaaaggaccccgtatctggatcaacatacagcatttctccaagtgcacgcataatgagatacagcaataaaccagcaatcccatacgcaatcagcacagacggccccgtccatttaattgtcgtgttggcccccataaaaagcccaaccccaattgtcccgccaagtgcaatcatctgcatctgacgggcagttaaatttcgtttcatagtcctcaaacccctctattttagcatcatcattattggttaaccccagaatctaaatttacttatcatcgtataataaaaaacacccaaaagcaatagtcgctctcatctttttatcatcttaaaagtgctttagaataacccttatattaattgaaggataattaggcccctaaatattaattttaaataagaaaaagcagttactgcgagaaacagtaactgcttttttgaaacatgctttttggttgcaacaacttccgcttaatctaaaatttcaaataatcctaaaacctggattatttgaaattttttattaatgctcagttgctaaccgcaaccaaacgcactcttgtctgaaacgtgcttttcaagctaactttctgcgcttatcccagtgaatcaaacaatcgactacgtcgcttattcgcttccctctgataatgctcaaaagttgaccgagcttgaacccactctttttgaaacgcactctaattggcgacgatattgaccaatttatttggaatggcaatcactttgcgcaccgtcttgtcagcaatgaattcagctactttttcatttgccttagccatcgcttctaattcttccttcggtgtgtctttagctactgttactttggcctttaacttaccgttaacttggaagatcacttctacttcgttagcgaccaatgctgctgggtcaaatgttggccagtccacgtaactgattgagtcatcatggccaagcattgcccataattcttccatcatgtgtggtgcaattggcgctaataacttcacgaagccttcagcgtattcacgtggtagtgtgtcaactttataagcatcattgatgaagaccatcaattgtgaaatggccacgttaaagtgcatgctttcgaagtcttctgtcactttcttaacagtttcgttgtaactcttcttcaattgttcatcattttcagcgacaatcttgcttgatagttggtcgttttcgtcggtatcttcttctgtgtatagacgccatacccggtccaagaatttacgcgcgccggctaagcccttttcactccatgaaatggaagcatctaatgggcccatgaacatttcgtataaacgtaatgtatcagcgccaaagcgatcgacaacatcatcagggttaacaacgttcccttttgatttcgacattttttcgtggttatcgcctaaaatcataccttggttatataggtgttggaatggttccttcgttggcacgaccccgatatcatacaagaacttgtgccagaaacgaacatataataaatgaagcacagcatgttccgcaccaccgatgtacatatcaactggtaaccagtctttcaacttatcaaagtcagccaatttatcagggttcttaggatcgatataacgaaggtaataccatgagctaccagcccattgtggcattgtattcgtttcacgacggcctttgcgcccattttcgtcggttacgtttaaccagtccgctaagttcgcaagtggactttcaccagtccctgaaggcttgatatcacttgttaatggtaattcaagtggtaattgagcttctggcaccactgatgttgtgccatcttcccaatgaataattggaatcggttcaccccagtagcgttgacgtgagaataaccagtcacgcaacttgtagctcacttgttcatgaccagcattatgcgctactaaccaatcaatcatcttgtcgattgctgcttgtttgtctaaaccatcaaggaaatctgaattaatcatcacaccaggttctgtgtgaacagcttcttcaggattaccaccagccacaactggtttcaatggtaaaccaaatttcttcgcaaattcccaatcacgagggtcatgtgcagggacagccatcacagcaccagtcccgtatgaggctagaacgtaatctgaaatccagattggtaaccgttcgccattgactggattaatggcgtaagcacctgtaaaggcccctgttttatctttcgccaaatcagtccgttcaagatcactcttgtgttcgatttcttttaaataagcatcaacagctgctttttgttcaggcgttgtgatatcggccactaatttatgttctggggccatcacgatatagctgacaccaaacattgtgtcggcacgcgtggtgaagacatcaatctgagcgtcgtggttttcaacagcaaatgatacttcagcgccttttgagcggccaatccagttgcgttgcatatccttgacactttcaggccaatcaactaggtctaagtcgtcgattaaacgatcagcataagccgtaatcttcaacatccattgacgcattggtttccggtaaacaggatagccaccgcgttctgttttgccgtcaatgacttcttcgtttgcgacaacggtccctaaatcagggctccagttaacagccacttcagcttcataagctaagcccttttcgtacattttttcaaaaatccattgggtccatttgtagaaatcaggatccgttgtattcacttcacgatcccaatcgtatgagaagcctaatgaattgatttggcgtttgaacgtattaatattggtttgcgtgaaatcagcaggattgttcccagtatccaacgcatattgttcagcaggtaagccgaatgcatcccaacccattgggtgcaacacgttgaagccttgcatccgtttcatccgggccaagatatcagttgccgtataaccttcaggatggccaacgtgtaagccttgacctgacggatatgggaacatatctaatgcatagaaatttttcttatttttatcttctgttgttttgaacgatttgtgtgattgccagtaagcttgccacttttgttcaactgcgcgatgatcgtaagtcatatcaaacactccttttttttacgtgctttcaaaagcatggacacttttgacgcactcttttttaattcacttaacgccaataaaaaagtcctatggtataaataccataggacgaattgaccgcgatgccacctaagttctgtccaatctatattggacaactctctggccttaacgcggcagacgtttctatctactatcagttcaatagaaaactcaaaggcgagttcgttatgttaaacgacgtgttcacactaaccacacgctctctaaacgcttaacgataactactaatccttctcaacgttaaataattgttcttagcataccaaactcttacttcaatttcaagacttggccgactaagattaaatcagaatgtaaattgttcgctgattttaattgtgcgatactggtattatttttttgtgcgattgaccaaagactatcgcctgatttaaccgtataagtcttcccagaattcgtgttaggcgtcgttggcgttgtagcgccagccattaattttaagacttgacctgggtagataaagttattcttaatattattagccttgattaattgcgccatcgaaataccgttacggctagcaattccccagacagaatcgccggccttaaccgtataagtcttcccagaagcttgccctggatttgtactatttgtattattgttgtttgaattaccagttgttgcaccttggctaaccactaatttttgaccaggatagataaagttgttccggatattattccatttaaccaagtcagccattgagatgccgtaacggtttgaaattgcccagacagaatcccctgatttaaccgtatacgtcttgtttgaagtctgattaccgttattgctgtttgaattattgttatttgtattgccagttgcggtttttgaaactgttagaacatcgccagggtgaatcatattattcttgatgttattccaactaattaaatcgttcattgaaatcccatatttgttggcaatcgcccaaacagagtcgccggctttaacggtatacttatcaccattagctggtgttgttggattcgttggtgttgtagggtctgttgggtttgtcgtcccaccattgttgttgccagctgcactacttgaaacaatcaagacttggcctgggtgaatcatattgttcttgatgttattccagctaatcaagtcattcattgaaatcccataccgattagcaatcccccaaacagaatcgccggctctaacggtgtattttgtcccattttcaggtgtcgttggagtcgttggcgtggttggagtcgttgttcccccattattgttaccagtattggtccctggcgtgtcatattgcgttaaattgtattgttgaatcaaacggttcaaacttgacgcataattggttgctgttgcataacgtccttgtaagtattgtgtggcttgttgatagctacttgtatggctcttaaatgccccttgataataaggcgttgcaccaaatgaagtattccgtagcacatgcacataatcttgtaacgattggtagtatgaaggatattttctaaatgcagcttggatctgatacatgttcccatgaccatcatcttcccaagtccacatataaacagaactaccattgtaagtcccttttaccccaaacaagttataattaggggcagaacctaaaccactgctcccaaatcctgattctaatgatgcttgggcaatcataacagaggcgtacaaatcgttatcacccgctaattgttgagctgaactagcaattgaattgatgaaattttgtgcgcttgaattagctgctgccataacaacgccagcggttgcgatattggcactcgtactttgcactccagaaattggttgcgcttgagatggtgccggttgtggcgtagccacctttgtcgcttcattttcagtcaattgaggttttacaacaggttgttgtgttgattgggattcagttgtcgttgtgcttgaactagttgttgatgatgttgcactacttgctgtattagctgttgtagcttggtcatcattgtttgcactatttaacacatcttcagtggctgctttggcccgattcgaaaaactaggtgcaattgctgaacccatcaagacggttgcccctgcaaaagtcgtcacattacgaactttcttaattctaatttcccgcttctgcttatgtaagcttaccttttgagctgcaattcgctgttttctagtctctttcaattctaacgcctccgaatttccattattattgtctgtggcacaattaacttgagcttcacctgaactttattataatattaataaatggggaaaacaatcctatcacgcaactacttttattagttgtcttatgcttaataattattgtatcatttaataatcttctttgtctttaattacagcttattttgaaaggatttcttaaaaatgaccaaacgattttcggctagtttattcattcttggcacaatcagttttctaatcattttaatcagcgttgtgcaccatgccacttgggttatacattttgatacccttatcagaactggcatccggtcgctttcctccccattgatggatactgtaagcattgcgattacgtcgatcggcaatccctatagtataatgactttgaccaccattgtaacgcttggtttgctgggctttaaacagtggtcagcagctagctttttagtcattaacatggtccttttttcaacgcttaaccactttattaagatgagcgtccaacgaccacggcccccatttcaccatcttgtctacgcaggcggctacagcttccctagcggtcatgcttcgggggcacttctttttttcggaactttaagcatcctagtttactacttaattcgtcaacgcgtttggcgaaaaatagcgattggcacctgtttaatattggcactatgcatcggccttagtcggatttacgtacttgttcattatccgagtgatgtcttagctggctttttattagcaacggcgtgtctcggcggttcatggtactgttttattcattttaaattattgcatctgaaggagtcctaacacatgatacttgatcatcccactaaatttgcacattttctattagaccaggcaattcggcccggcgatgtcgtaattgatgccaccgtggggcatggcgatgataccttatttttagcagaacgcgttgctgattttggtcaggtttacggtttcgaaattcaaaaagaagccatcgaaacctgcgcggatcgtcttacaaaagcaaaccaagcaaaccaggttactttgcttaatcaaggacacgagcggattatcactgccttaccacccgagttaaaagtgcaagccgccatttttagcttaggcgcactcagtcctgattcttttgaacacgtgacattgcctaacacgacaatctctgcctatcatcaaattctctcacggcttaatcgcggtggcttactggtattcgttgttgatcctcggttcaatgaaactcaagaagaaatcgactatctaatcgccgacttaagtcgcctagaaccaaccaattaccaagtaacccactacaaggcaatcaacgccgaccaaggacaagtcctagcgatagaaaaaatttagagtgcgtcgtaaggcgaatatccgctgaggattaacacagcgtcgtgaatgattacaacgtaatcgtttgcggctcagggttaaccggaagcggatgccttacagagcacgtttagagtgtgatcccagtcgggtatctcttgaggattagcctagactggcgaatgattgctgaaagcaatcgtttgacaatcgtcgctaaccggaaagagatgactgggtgagcacgtttagagtgcgtcgtcagtcgattatctcctattcaaacattaaaaaaaggcccagtcatcattgatgactgggccttttactatcttataatgtcccgaccacttttgtaccgtgtgcttcggaaatttgtaaacgttctgttaacgcgtcgacattgtcggctgtaatgccaccgccaggtaaaatcacaatccgcccatcagcagcttgaattaacgtttttaaacgggcttcgtcgatgggcgcgtctaacggccccccatgcgttaaaatccgtttaacatcatgatcaatcagccattccattgctgcagcttgttgatcagccgcaatttcatcgaaagccatatggaaaacaacttgcatcccattggcagcaccaatcaacatttccatcgcttcttcgtcgatttgattgtcaggtgttaggcaaccaaggacgatgccgtcagcgcctaattcttgcgctgaaaagatatcagcttccataatttttaattcttgatcgttataaacaaagttgccgccacgcggacgaatcatgaccatcactggtacatcgtgttcatgcgcataacgcactgattcagccatcacaccccggctaaccgttgtgcctccgacagccaagttgtcgttcaactcaattcgtttagcaccattgcggattgctgccggaattttagtgaaattttcaacacaaacttctttgattaacatggatgaaccctccaaattttaatttaatcctttatgcaaatagcattgcacctaagacaagtaggcccaagataatccggtaccaaccgaagaccttgaaatcatgtttcttgatgtaatccatcaagaatttgattgaaataattgaaacgatgaatgaaaccaacatcccgactaataaaatgattgattgatcgcccgtaaacgtattgccttggtacaagaatttaccaatcttcaagattgccacgccgaccatcgttggaatcgccatgaagaacgagaattccgcacccacaaaccgtgatgtccctaaaataattgcccctaaaatcgtagcgcctgaacgggatgtcccaggaataattgataaggcttggaaacagccaatccaaaaggccgtcaaccaaggtaacgtatttaaatcagcaaatttcggtgtggtatgcttgttgcgattttcgatgacgatgaacaaaaccccgtataaaatcaacatgctggccacaatccagtttttcatcagatgttcatccatccagtcattcaatgggaatccaataatgactgatggaatcaccgccacaattaccttaaaccataacgtccacgtttgtttttgttcgagctggttcttacgtggtgagaaaggattcaatttatggaagtatagaatcacaaccgccataatcgctccaaattgaatcacataattaaacatatcgatgaatgcttttgattcatcaagtttcaaaacactaccgaccaacactaaatggccggttgaactaattggtagccattctgtaaaaccttcgacaatccctaaaatgattgtcttaatcatatttaaagttaacacaatactaatccctccgtaatccataatcgtttattagtatactcattctaaagttagattgcgactcaaattgaaagcttaatcaaattttattcaattcgcccgcaggaaaagccaaatgacgttgatccatcactgcttgaaaatcggctggtagttcgctttgaaccgtgacataccgttcttcaaatggatgatagaacgttaactcgcgacagtgcaatgcttgacgcggtaataaatcatcggccacaccgtataaattatcaccaattaagggatgccccagtgatgcaaaatgaacccgaatctgatgtgtccgacctgttagtaacttcaacttaactaacgtggcatcggtgccatgggcttcttgccaatattccgttaatgagcgtttgccaccaaccccaacgacccgccgcatgtaaaaatcatccgaccgtttgattggccgatcgatccacgcatgttgcggataatctaaccgcatatcaccactggcaatcgcaacatatgttttttgcaattctttagattggagttgcttatccaacaaactatgcgcgaagccgtgcttggtgaacatcatcaaaccacttgtatcgcgatcgaggcgcgttactacgtgcactgcctggctctcagcattttggtcaatcaagtattgtttgacgaaattggccattgtgttgtgcggatggttcggtgccggtaacgacgccacaaacgccggtttatcgaccactaaaaaatggtcgtcttcaaaaaccactttcaagtcccctttaactgggatgacgtgttcgacggccacttccggtgcgaggtaaacagtcaccacatcgttttgaaccagttgggcattggtatgtgcctcctggccgttgacgaggattgtgccacctgcaaatttaattttagttaactgactgcgagaaagcttatgccgccgtaaaaaattccgcaacacacagccttctgcatcttgatattgccattcaaatttcatgttttgacccaataaatgcatcttcgacacggttccagaaatggttgtgtcgataacgtgcaaactgtattctttcctttgcaattttaaattgcatcgaggcaattggtcgatccttaaatgtgaattgatcaattgtcacaacgtaatcacttgtcttagaaggcttcaggagcaaccattcatccgatggtaacacgattggtgccgatagtgttcgatatacgcgattattaatcgacgcaatttcggtcatctgcatcgcgtctaagcgtggatgtaaaaccgccccaccaatcgacttactataagctgtcgacccagttggtgtggaaatacagagcccatcgcccctaaaactttcaaaaaaattctctttaatgtaaacgtccgtccgcaaagtcgctgcataccgacgtaacgtcacttcattgagcgccaaactgcgactgatttcgtgcgtatccgcatattcgattttaacttctaataacggatagctaatactctgcccgagatcttcttgcaaggcgacgactagatcatcgacttcaaaatcgcgccagtcagtgtaaaaccctaaatgtcccgtgtgcacgccaataaaccggatgtgcgctaaatcgtgggtgtaccgatgaaaggcagataaaagcgtcccatctccaccaactgaaatgaccacatcgggcgtttgatcatcaatgacaaaccccgtattgatcaatttttgcgttaagcgattggcaacttgaacggaagaactaccgtcattgctaaataccgttactttcaatctggcgtctctccttcagaatcattttcagttgccttttcaagtgcgttttgccattttccatatgagaagagttgttgtgcttcttgaatttcttcacgaatttcagacatttctttatctaacataaaggatgcttcggccgctcttttaagccgcgccttcagcgtttcaggaaattccccttgatatttataatttaatgaatgttcaatggttgcccaaaagttcatcgacattgttcgaatctgaatctcggccaaaatcaatttttcaccactgattagttggactggatattcaattacaatatgatatgaccggtaaccacttggtttaacatttgaaacgtaatcccgttcttcaacaattttcatatcagtccgttggtgcaaaaggcccacaatttcatggatatcttccacaaactgacacataatccgcaaaccagcgatatcttgcatatcttgttcgagtaaatcttctgtaatgtagcggcgttgcatcttttctttgatactatcgattggtttaacgcgcccagttacaaattcgatgggtgcatgttcattattttgttggtattgcttgcgcatcccacgtaatttaatttttaattcgctaacggcctgttcataaggcattaaaaacttcttccaattttcgaccattataaacccctcattcactctgtcacatacagcactattttaacatagattagaattgaataaataataatcgtctgaaatacaaatttcattacaagtctgcttttttgtgctaggataataacattgcttttttaaaaaggagctcaaccgatgtcacaaacgattgaacgcgaatttaagacgatgctaacggcggcgcaattctcgcaactaaaagcggactatccatttgcagcgccgtttgtgcaaactaattattacttcgaactgcctaaccagggattggctaaacgtcactgggggttgcgtattcgactctttgacacctatgccgaacagacgctaaaggtgccaaccgtagaaaatgctcatagtctgattgaaatcactgatcgcctaacacttgagcaggctactcacttaattgagcaccaaaccgtattatcgtctggtcagatcgctgtctattttgcagcacaagccgtgattatcaaagaattgttcatctggggacaggcaacaacgcaccgccagaccgcgtctttagttgctggcctgttaacgcttgatgttacccaataccctgacgaaacccaggattatgaagtcgaaattgaagtcaccaacgtccaagaaggggcaacttggtttaaatcatttgtcacccgctatcaattaagtgaacaaataccacccaataaaattatgcgcgcccttatccatcaagcttaaactttgtcaagctaacttattgcataattttaaaattttgttagagtagacagtacaagcgcgtcgagcagtatatacaatatagaaagtttggaggaaccaacttgttagaagtgtttttatttatcaacccaatcgggcaactttgtttacgttccgaagaggcacttttaaagattatcggcgaaaccgatgcaaatattcattttaagtttattccagtcttaaacttaaaaaacgtcgagcattacatgcagtttcagcaacaaaatagtcatgatttaaacttacgtaatcacgttttcagcaccatttatgaagcagtactcgcttataaggcagcaacgttccaggggggcaagaagagccaatcatttttaatgcaactgcaacaagcattccgtgaaccagatatggaacttaacaacgaattagtccttacaattgctaaacgcgtaggacttgataccgaaatgttacttgaagattggcacaatccacttactaaacaggcatttgattcagatcaacaattatcttgtgagatgaacattcagatgaccccttcagcagtagtcttcaactattcaaaaggtgaaagcgaatcaggcttattgattgaaaattgcgattcctatgaactcttgaaacaagcctgttgtgctgaaacaacacctgaacagactttccaagcacttcaaaaacaaaaaagcaccctctcacgggttgctttgcatgttatttcttaatcttagaaccggtggtcaaccgacccccggttcttttttaatgcttgtttcaaagctatttgcccccattgtgcaaataaggattgctttagtagtggttgttggagtaagggcgttaccgctaaaaaaagatcaattggttgggcactcaaccaccacgttacccgactttcaaactgactgagctgataaatgggtggtacattacgtgtgcagtaacaccagtccggaacggcttgcaagcgttcatggtgggcataacaatccgcctgtaacgcaacataatgtgcgtcttgcagccctaatcgacggtcaataatttgttgctgcataggctgtgacttgcccttataatgattggctggcagtcttgtttgtgctacaagcaagcgcacaaacgccttagttgtcaatcgcagggtttgccaagcataaccagcaaaatcacgggcgacaatatggtgatataacacccattgcccccactttggcaaataacttaccacataaaagccccactgccgccgatagttgataaaccccaactgttgctggcttaaataatggttagtaaaacaataccgttcaccaaccacccataatacaggtaatcggcgctgctgatagccgattgttcgttggtttaacttatctggcgtcaatgggctgcattggtattcaataattaatggttgctgattccgcgttaaccatacatcagcgcgctgtgtctcgccgacaggtacttcaaaggtagcatgccagcccaacgcatgtgctaattcagcaatcgcctgttttcccgccagatgggctggactctcaccaccaccagatacacgttctgcgatatgtgcgaaatatggtgctttatgcaccccacgatgcaactgaaccagttgttgacaatgtggacagaaataccgcgctacttgctgttgtttggctgcttgatcggcgcgaattaagcacccgttagtggtctgtgcaactttcattatttatcacccccaccgaaaatacgcaaaaaaataacgggttctcctaaatttaggaaaacccgttatttttaatgtttgaagtagtagcgtgttaactcaagcgcactattatccatgactttttcaccgaattcacttaaaaaagctgctgtgtattctgacttctgcccgtattcattagcgaccgctaaatcatcccgtgcaaacgcttcggtcgtattctccataaaaataataatctgtgcatagtactgatgtttgtaaagaaataggttcgacacaccactttcgatgtgtagctgttgtgccaaagcaatccaatcgtcaaatgacttaaacgataacacaatctgtttcattggattgtccgcttgattcatataagcggtcatttcatcctcttcctcagtcgcatcatcttggaccgtatctcgtttcaacagttgttctttaatgtattcagtaataccgtctttgccttgcaccatttctgattgacctttaccaccgtcaaagtttggcatattcttactaatcagtaattctaacccttgatcgttaggcaacacttggaacgttactgcatcgttgttcgcaaatgtgtgttcactgtccacttcttccagaattgaatagaagaaccgctcaatctttttatgattgctcaacaaatcaagtccagtaatcccgcgttcttctaaatcatcattttctaatagaacccgaattgtgttctcgtcgattttttccattctcatgggacaacgcccctttctaacgcgcttcttatagcgtcgtaattcactttctttgacctaccataccagtatctggcgtaacattcaagtatctacatcgcagcaattaattttttaacccatcaaaaaagtcgaggctgttaacagccccgactctcctctagaatcctgctagtaattgtgcttgttgtaattccaatgcccgtacttcacgtggtaagaaacgacgaatttcatcttcgttataaccaacctgaagtcgtttttcatccaaaataattggacgacgtaatagccctgggttcttttgaactaaatctaataattcgttgattgataagtcatcaattttaatgtttaattcttggaaaaccttagaacgcgttgagataatttcttccgtgccatcttcggtcatgcgtaagattgttttaatttcatttttattgagaggctccgaaaagatattgcgttcttggtatggaatattgtgttcttctaaccacgcccgggctttacgacaagatgtacaacttggtgatgtatataacgtaaccatatgtctctctcctttattaacatgacaccttacttaacaataagacaatcattttctctcttacaaattttattatacgcgagtcagcactagaaaactaccctaaaattaaatttattaattattttttaataattaataaatagacatttggacataaaacgtctaattaaaacggtttattgttaaattttcccactcaccattaatttttatgtttttacatttatatttatcattcaaaaaaaattatagtagtttctactttctaatgaaaattcacttattttttgtaagttccatcaacgccgcctatattacacgctccgacatcaattgtcaaatcctgttgggcaactatcacgggtacgtccccaacagtcgcttgtgcttgtgcctgtagcgtttctgccgaaaccccttgtggtaaatgcgttaatagaattttagctgcgccactttcttgtgccaagttaccggattgcgttgttgtcatatgcgccattttaccagtgcgatcttcaagaaaattcgtatcagtcatcagtaaatctgcagactgacaaaaagcagctaattctgggaaatacgccgtatctgcagtaaagaccaagacctgccccgtcgtttgttcttcaattcgaacagcgaatgctgggacaggatgcactgtccgtttgaaagttactttcaacggccccagggtcagctctgtgtcttcttgataaccaaagccctgcgtcacacccggttgtgtcaaactgccaaagtggagtggatcttgcagatgcccgtaaataggtaaaatgggttcctttttggttccttgatgcagttgccaataatattgtaaaacccccacatcagcaatgtgatcgtgatgatagtgcgtgagaaggaccacatctagttgcaatgggtcaagttgtttctcaagcgctaataaagcgccactcccacaatctagcaataaatgatacgccccacttgttaataaataactactagtcccaacaccggcgtatggatatccaccgtaataacctaagactgttaattgcatttttaaatgaccacctttctaatttctatagtagcgcattccgggtatcgcgcgcactatatttactaactaaataaaaaaagaccgccacccaaatggatgacggccctaatgctattgaatgacttggactttcttagctttaacttcttgatagaaaatcgtaacgctcataattaagtatggatagaaccacaagagacctagtccagcagtcatatagacgaccagttcccatccaataaatgataaagtaagcccgagtaatttcagccagttcccttttaaaatcacccatgaaaggctaaagattaatttgagtggtgcttgtggtaaatcaaacttcaacagtactaaaatctgataatacgttaaaatcacgggttgcaacagtgacaaaaccaacatcaccgtcacaaacaataagacagtttcagaaattgtcccctgctggctaatgtttagcaaataaggcgcaacggaatctaatccattaaaagtgaattgaaatacacgatcccaaccgagtaaccgataaaacggcgccaacccaattaatagtaagatccagtttaacacttgttgaacaagattcaataccacaagatgggtatacaacggttgccggaataacaataaggtatcccggtaatagctgggcttattctggctaactttataaacacctaagaaaacagcatttaaaaagataaagtataagaaataattggcaaaggtgttgagcatttgataaccaaatgaactggcgccaaacacgccttcaatcattgagtcgactactatctcaactaacaaccaaagcgcgactaaagcggccattttctgccagtttccttttaataattgacgcgcttttgcgcggtacatagctaattgcaaaaactttccctccgagtttagtagaacacatcactattgagcggtgcattcacaattcgattgtagatattggccgtaattagatagaaaacaaagtaaatgatgataaacaggccgcaaacgatataggctaattgtaacccaggattatctaaaaacaaacccaataaccgaattgcaaagaaggcgtgcatcgatcccaaaataattggcagtaaaaagagcatcaaaatttggaaataaatcgtgcgcttaatctcaccgtcactcatcccaatttttttcaatgttttatactgcaaaatctcttcttgtgcttctgacaattgtttcaacatgatgatactaccagtggctaacatgaagattaacccaataaaaatggcgacatacatataaaatccgaagtttgcgttagcaatatctcggttaggtttttttaaaagcacagaatagcggcttaactcttctagccgttgatcagtggttttaatttcataatgggtttgcccggcttttttgtgcgtcattaaataatcccattgtttgggcttttgagatagacggaataaatcgcgcattaatcgtttttgcttttgttgggcagcggagagctgaactgcatagatttgatcaactgaagttgcttggacttgttgatattcagcatcattggccacaatcacgtttaagttaccatcaaagaagacatcagaaccgtttggaaatagcttacgaatgtgtacaatccgaaaatctgaaagcccagactgttttaattgcaacgggattccagctcttttcggtggcaaacctgcacctgctctgcgaggcatcttcagcattgttaatggcaagttaatgatggtcaccacagtatttttcttcaatttagttgctggtaacttaaattgttgcgccattacttggttgtattgggataatggcatgacaacagctgctccatccattttgatgccttcccgatttaacggtgaattgaccttaaatcgagcatccaccaatttaaacgaagacattgtttgactaaccggctgaacatgatattgcgttaaaattttgtcgaccgctgctttttgactttgtgtataaaccaaatccaccggaatgttctgccgtaatgtatcttgaccgtgcgtataaatcatcgccgcacttccgattgcggtaatagtgactgcacttaaaatcgtaatcatccacaacatctttgcattctttttaaaacgaaaactcaaattcgtaacgtttaacaaatgtgtcccacgataataaagccgtttccagtgccgttctaactgtagccaaatttgcgtataggcctgaaaaaaagccagtgtgccaaaaatttcaagtaataaaatggttagtaaataaaccaaatcaatcccaaaaccatagcgccgctctaagctcggcatcaaaaccagtgtttggtctgccaaataatagccgctgataatcaatacaggtgcaataatcccccataaataagtcagccagttcggtcggcgcactttccgactgactgcagatggttgcagcaatgtcactaattgataccgataaatcatcgtactgtttaaaaaaccagttaataggaacaacccgccaaaggtgaatgtcgtttgttcaatggcccgccatgatattaaaaacggcatggcaaccgcaatccccatcatgcgtaataataacatcgcgaataatttcgaaaaaagaatcccgaataacaacccgataatcagggcaatcacaccgataatcaaactttcaaagaagaagagtaagctaatctgaaatttagtcaccccgatgacacttaaaacaccaatctcccgccgacgccttttaatgaaaaataaattagcatatgccaagaaaaaagcggcaaacagcaaaataattaaacctgctacttggatcatccggccaaaagctaaagattcaccagccatcttgaggtgcctaaagattggcgcagtttgaatcgacgtaaagcagaaataaaccacaatcgcggcaacacaggcaatcacataagccgcatagtcgcgcgcatgattaatcgcatttctaacggttaggtgtaacagcattgaaacggcctcctccacctatggttgcttgcatatcaataatttgattgaagaattgttgccgatcaccattgcgaacgatttccgagaataattgaccatctttaatgaaaagaattcgccgacagtaactagctgtaaaggcatcatgcgtgaccaataaaattgtcgtcttttcctgacgattaatcacggttaaatattgtaaaagctccgtagctgattttgaatctaaacttccagttggttcgtcggccaataacaaagtgggattggtaatcattgcgcgcccacatgccactcgttggcgctgtccaattgaaacttcatccggataacgatccaacaaactactaatgcccaagactcggctaactttatccaaccgtttttcaatcactggcacacttaacttatcaagcgctaatggcagtaacatgttttcgcgaaccgtcagtgaatctagtaagttaaaatcttgaaaaataaagcccaaatcttgccgcctaaaattagcaagcttagcttcccgcatccgactcacaacttgatctttaattaacacttgaccatgcgtcggccgatcaatggtcgcaatcatatttaataaggtcgttttcccagcgcctgaagggcccataataccgacaaactcccacggttcaatatcaaatgaaatattattaagcgcattgaccagactaaaccgatgcccgtagactttcgaaacttgttggactgatacgactgccattttttcacatcccttaactaattggtattcattttagcagagttgaccgcaaaagcccattttataactacgaccttagttggttgtcttttctagtgaaagtggttagtattagtctatctatgtatgaggagaattcattatgtttgaaattatgattgttgaagacgatccaacgattgccaacttaatcgctgagaacttaaataagtggcaattacacgcaaatattacgaccgatttcgataccattttcgaccaatttttaaccaataaaccccatctgattttactcgatatcaacctgcccgtttatgacgggttctactggtgtcgcaaaattcgtgaagtatctaaagtccccataattttcatttctagtcgcagtaccaacatggacatggtgatgtcgatgaacatgggcggcgatgacttcgtcaataaacctttttcgatggaagttttaattgccaaaattaacgccctcttacgacggacttacaactacgtcgaccaaaatgccgatatcatcgaacataacggcctaatgattaacctccaaagcggcggagctcaggtgggtgagactaccattgatctttccaaaaacgaatataagctcctccaatttctgatgcgtcaacacggccagattgtcagtcgcgaaaagttattgcgtgccctctgggacgatgaacggtttgtcgacgacaacacactaaccgttaacatcaatcggcttcgcaaaaaaattgaaagtgctggtttagaagactacattcagacgaaaattggccaaggctatatcatcccctaaggagttattatgacgtttaaaaaattcttacgtgatcatttatttcatatcgcttttttcttcagcggtatgattgttctggatatcgtcctatggctcgaccctagtatgcgctttgctaaggcgacacttttatacctcgatttattgctggcgctttttttctgcgcctttttggttggcttatacgtctaccatctcaagtggtaccgcacaatccaaacacgcttagatgctaaagaagatagcctcaactggccacttacaggcgctacctcggctgaaaaacaattcattcaacactacgtgaatcaactgctagcctatcatcaacaaagcatcgaccgactaatctcagcgcaacaagatcaaaagaatttcattgatggctgggtgcacgaaagcaaggtccccctggcagctactcaattgctcattgaatccatcgaagaccagattccagaagacaaattcaatcaattaaccgatgaactgattcaaattgaacactacgttgaacaagtgctctactactcgcgtctcgatagtttttctaaggattacttggtgcaggaatacgatttgaaacctttagtcaaccaaatcatccgccaaaatcgcaattattttattcaaaaacacatccaatttaaactgcttggtgccgatcaaaccgtcttaaccgatgctaaatggctggcttttattttgaatcaaatcatttccaatgcgttaaagtataccccagatggcgcacaaattacggttcagattgaacgtgacgaacaaggcgtttggttaagtgtcatcgatacagggattgggattccggctgaagacctaccccgaatttttgataaagggttcaccggtcaaaatgggcgctattctaaccaacgttcaaccggtttagggctctatcttgcacgtgccttaagtgaaaagctcggtcacgaactcaccgttagctcccaacaaggcagtggttccacttttaaattactctttccttttttaagttactacaacacggatgacgatgacggcttattcggcaaaacccatcctgcagacaaatgaaacggagcttcaaaatgcgtaaaacacttttaatcactacccttttaacaataacactcctagcaggttgccaagctaaaaaaccggcttcatcaaccacatcccgcgcgcagccaactacgacgacctacgccaaccggaaaacaactaaaaaagccctcgcgaccgattcacagacttggttgtttaacaaacaactcctttctaagcaaactaaaaacggtctttctgatgacatcaccgtttcaaatattgctcaaatgaccactcctaaaagttggctgacctctaaaggcaccttcacaagtcagccgattaattatcaacaaatttcgtttaaaaaatggcaacaagatagccgcagtcatctgatgaagagctatcaaaagacactccatctgatgactgtggcacaagtcaacgctgcattacacaaattgggggctgactttaagattaaacacctctcagatctcgtctttcttgagactaagactgggaaaaatacaattgaccaaggattcgttgccaaaggaaatcatctatacgcaattacagctcattacagagatatacaagaacccaccaattttgaccgcggacagttattcgtcagtcaaaaagcaaccgccaaaacaaccgccagtcctgttgccctcgaccaactcaatggcacttggattgcggccgcaacaacgacgagtgctaatgacaccggaaaactgatggtcaaagatggcttcatgtaccaaaaacgttatgatagtattgaacgctctgccattcaagatcttgccaaatacactttagtaacgctcaatcaaaatacaatctatgctgctcaaaaaagggatgcagcacaagctggttatcaattaacccctaagtcgattgctagtggtgatagtatcggttatctctacctcttcatgaatgatcatgaactgctacgcatcggtgctggtcaagtaacaagctatcaaaagacggattcactagtagctactgccgatttatcacagactgatcaaaccatttttgagcaacttgatcaacaaaagcctggtgaatcagcttcaaccattacggtcaaagcaggtcccgctgttgtcgggatgagtgatagtgtcaactatctaaccgatgcaaccgctgaccagatttcgaacaatatcgtcattggtagcgttcaaaacgggcacgtcaccattgcaagtgagtcaactcattaattataggcacaaaaaaaaggtccgacatgaatgtcggacctttttttgtgcttaagccgcttgatcgcgggctgcttcttcttttaaagccatgtctgtggcgatcttgatgaatggtaggtaaatgagcactgaaacaagtaagttcactgctgctaataccccaccttgccaactaaccgttgcgatgaccccaccgataattggtggtgttacccaaggtggcataaccgttgcagcgggcactaacccggtgctagttgcaaagtatgcaattgtaacgatcaccattggtgtggcaatatatgggatgaataaaattgggttcaatacgattgcaagccaaatgttaatggttcgttaatattgaagaccccaggagcggcactcaaattcccaacgattgaatattgtttattctttcgacccactaaccagattgcaatgattaagcctaaagtagcaccagtcccacctaagttaacaaatgaatcaaagaatggtttgttaacaatatatggtgctgctttaccagctttaatcgcatttaagttagctgtaattgcaggtgcattgattgtttgcatgaatggttcgatcatgttagcaccgtgtaacccgaagaaccataagaatggtgtgatgaatgctaataataatgctgaaggatagctgtttgcaagtccttggaatggttcttggacggctttgtagaatgatgtcacaatattttcaacaccaaagcctaatagaattgttgcaaataatgagaagactgcgatggtaatcattgatggcaataatgccgcgaatgattgtgaaactgcaggtggtaccccatcaggcatcttaatgactaagtgtttattacccaataaacgtctgagaatttctgttgaaatcatcgcaacgattaaagcaacgaacaagcccattgagtccatccctgcaagaccgccagcagcaaagaatgaccctaatgctgttacgccggctgctagtggattgatattatatgacttacctaaattgtaagcaactaggaagacgataaacacagaaagaatcgcaaatatcccgctccaagcattgcccccgaatttagtccagatataagccttttcagcgcccttaccaactgtctttgagaacacactatccatgaaattggtatatgccggaattggtaaattattaatcaaggttgcaaaagcccccaagatcatcaatggcatcgttgttacgaaggcatcacgaatggcaaatgtcgttgattcccaacttttgccacaactggtaaaaagcgtttctccatgaaactgataaatgaatccattaacctcactccttttcctgaatcataattaaaaaataattgctattacaagtattatgttacagaaagcgttgtcaaacgataaccccgttcattacctatgaatgtccagtttttcacaaaaactaaaaaaagcgccaacccattctaatcatggattgacgctcttttttatccgtgttaggtatataccaatgacggaaaatgaaaattaaatttttaataactttattttacatattactttcaatgaacaagctttgcccatataacgggctttttagcggctaatgattttttgacatcgataatccgttgattggcactccctctgaattgcaatgtcaaatccatttggtccttcatgaagcgcccatcaactaagatatcaatcttagacagcaactcgagtttatcatctgattcttgcatcagttcttcccacgtatatcccgtccatgaccagacgtcttttgtctgcccataagtggcgcgaattcggtctactagcgataaacaagtcttggtattcaagaacggttcgccacctaataacgtcagtccttggacataagattgccctaaatcagcaataatttggtcttctaattcagttgtataagggcggccatagcgaaaattctgcgccactcgattgtaacaaccggggcaagcaaacatgcaaccactcacatataggctacagcgcaccccttcgccatcaacaaagttaaacggtttataatctgcaatataatcctggcttagtgtttcagaaagccattctttgggcgccggattcttcgggccttgttgttttactgccatcttcaaaaactccttcaaatcccgtattcacaattactgccgtgcaacgttgttattatcgttgccaatggtaatatgcatgtgcttaactcgactggcgatttccttatgccgaccatgcaccattggacgttgttgtggattgcctagataaccacaagtccgcttaacgacgtcacatgtagcagcatccgtgttcccacattgtgggcattggaacccgcgttctgtcggcttaaagtcccctttaaacccacatttaaagcattgatcaattggcgtattcgtgcctaagtagccgacacgatcgtaagcataatcccagacagcttctaaagcctttggattttgacgcagatttgggtattcacagtaatgaatgaacccaccagaacagtattttggataatctttttcaaaatctaatttttcaaatggggttggtgctttacgcacatcgtagtggaaactatttgtgtagtattctttgtctgtaatattttcgacaatgccaaatttttgcgtatctttttgacagaacgtatttgttaaactttctgctggtgtgctgtaaacagagaagtgatagccgtattccttttcccaatcaacgcagtgattatagaggtctttaacgacgtctaccgtaaaggcttttgccttggcatccttttcccagtctggcccaaagaaggctgtaccgacttcataaaggccaatatagcccaatgaaacagttgcgcgtgaatttttaaagacttcatcaacactatcggttttcttcaaacgcttgccaaaggcaccatattcataaagaatcggcgcattttctggcttcgcttctttagcgcgttccactttaaagaccagggcttccttgcagacttgcaaccgttgttctagaatttcccagaacttagcttggttgccatcagcttcaagtgcaatccgtggtaaattgattgtcaccacgccgagattcatccggccactattcacttcttcaccatgttcgtttttccagccttgtaagaagcttcgacaacccattggtgctttgaaagaacccgttaattccaccaacttgtcatacattaaaacatcgggatacatccgttttgtggcacattcaacagctaattgtttgatgtcataatttggatcagttggatttaagtttaagccgcgttttactgcaaaaactaatttagggaagatggcagtccgtttttctttacctaatccttcaattcgaattgaaagaattgctttttgaatcgcacgttcaatccagttactgcctaatccaaaaccaagcgttgtaaatggtgtttggccttgggatgaatataaagtattgatttcatattccaacgcttgcatggcgtcataaatatctttttcagtcttggtttgcgcataatccttttgttttgcttcgccatcaatccaattcttggcatctgctaaatgtttggcataattcttttcggcaaatggtgccaataattcatccacccgatcagcggaacaaccaccatattgactagaagcaacgttagcaataatttgtgacatttgtgccgtagcagtttgaatcgaatgtggcgcttcaacttcggcattcccaatcttaaagccatgattcaacatttctttaaaatcgattaaacaacaattggtcattggactatatggttggtaatccaaatcgtgccaatgaatctcgccttttaaatgggcgttcgccactttatcaggcaacatcttaagccccatcgctttagcaactgtccctgccgttaggtcccgctgtgtattaaaaacatgactatctttattcgcattttcattgaccacagtttggtcttttttcaataatttttgaatggtaaagttgatatcagttgccttattccgggcaaagtcccgttgcgtccggtagttaatgtattcttgggcaatatcatattggtgatgttctaaaagtttatgttccacaatattttgcagttcatagattttaacatctttatcaaatcggctgccgacttcactcacaacatctagtgcgactgtgtttaacacttgatagtctaatggctctaattccgtcttcacatttttagcggctttaataattgcttgttcgattttatccgcagaaaaaggcatgattcgcccatctcttttaatcactttaatttgcaagtctgcttctgaagcaattttcatatccatcttagcaccagtctccttttgaatcagtaaccccatcatagcggattaaaaattcagattcaacctatatatagtagataaaccaacaaaaagacgcactacaactatatgttgtgtgcgtctaattgtgtgcgatattttctttcgcccgtccttatcgaaatctacttcatactgcttaaaaaaagattgacatcatgcatctcgttttaatttcaaagtcattgcattaatagccacaacaattgttgagagtgacattaagattgcaccaactgctggacttaatactaacccaattccggcaaatagccccccagctaatggaatcgctaaaatattataaccagcgccccaccagagattttgcgtcattttgcggttagttgcgtgcgataaattcaagaaatgcataatatcgtttggattactcttcacgaggatcacatctgctgaatcgattgcaacatccgtcccagcaccaattgcgattccgatatcagcccgcgttaaacctggtgcatcattaacaccatccccaaccatcaggacgacttcgcctttagcttggtaatctttgacaattgcttctttatcttctggtttcaagttcgcttgaaccgtcataccgcccaattgtgcagccactttttcggcaacttgttgattatcaccggttaacatgaccggttggatatgccgtttctttaatgcttggatgaaagctggcgcttctggtttaatctgatcaccttgtgcgactagtcctaaaaccgtttgatcttgtaatagataactgatggaattccctttttctgctaaagtttggaaaagagcttgatcaaatttaatatgctgggcttgtaaataagttgccgtcactatttgataactttgccctgcaaccgttccagacaaaccgacgccttgaatcgtttgaacattgtctgcctgtaaatcaggaatagtttgtgcttggttatactctagaatcccagtggccaatggatgacttgaatggcgttctaacgcaccaaagaattgcatgagtcgttgttcatcaagtgctgtatcgaaaacttcgacagcattcactttgaatgcaccttgtgtcaaagtccccgtcttatccatcaaaacaacggtaaccttatctgacaattcgattgcttcacggttacgaatgagcaagccgtttgtagccgcaatcgctgtacttctggcaaccaccaatggaatggccaatccaagtgcatgcggacaagcaataataaagacggttaccatccgttcaaaagccgtattcagatcggccaagaacacccaactaatgaaggcgataatcccagcaaccaatgcagcatagaaaagatacttcgcaactttatctgctaacccttcaacttttgatttttcttgttgtgcttgtttaattaatttcatgacttgcgctaagtaaccactttcgccagtcccggtcacttgcacggttaacgtcccatttccattgactgtcccaccgattacttgatcgccttcagccttcacaacagcctttgattcacctgtcactaaggattcattgacttggctttgaccggcgataattaacccatccgcgggtactttttcaccagctgcgactaatacagtttgtccttttttcaagtcctttaaatcaaccgcgtgttgatgccctgcttgatcaattacttgtgcttggccgggtaacaaagcagccattttttctaaagcactccctgcactcattaccgcattcatttcaatccagtgtcccaacaacataatgacgattaacgttgcaagctcccagaaaaagtccatcacgtggccttgtgggttcaagaaatggttcgcaacaaaggcgtataaactatatagataagaaacactgatccccattgcaattaaggtcatcatcgctgggctcttagcagataattctccttgagcgccctttaaaaacggtgccccaccgtaaaagaagagaaatgttgctaaaatcaatactagccaatctgaacctgggaaagtcgtttgaaaaggtaactgcatgcccataaatggtgagagaattagaattggtaccgttgcaattaatgaaatccagaatttttgtttcagatttcccatgtgcatcatatgaccaccatgcatcatcatatcgccgtcgcccatgtcatggtgcatcccatgcatatcgtgattcatatgccccatatcatgatccatcatctcgtggtcatgatgcatgtcgtgcatgctgtggtccatctgatgttcatgctgcatctctttcatatcatgtccttcatgttcgtggtgcatttcatcgtgtttcattttacttcctcctctatgcaatcacaattggctggtaaacaatcacattcaatcattgttggtgcactaggtaatttagccgctaacaccgtttgtaacgtctgaatatcatcttgactgagcgttgtttgctcaattaaagtggctaatgtgcggccttttttcatcccacacaattggttaaacagcgactgcgtggcatggttcatcgcttcatcttctgcgatattggccgtatatataaatcggcgcccttctttagtggcaattaaatagtcttttttaaccaaccgacctaccaaagtcttaacagtcgacgcttgccaatcacgcttttgctgaacgagttcaattaaatgactgctgttgacttgcccaagtgaccaaaccatccgcataatttcccattcggcatccgtaataacccctattttttcagtcattcgcggttttctccctttcgtttacatttgtaatcattagttacagtttacatttgtaatcgataactgtcaatcttttttgctcatccacattttacgcacaaaaaaagaccgccacagtgggcggtcttttaccatttaattaaagattttgcataaaatcttcaactaatttttggttttcttcattacttatattcacattaacagcggtttcaactaaatcagttaattgagttgtatctaaacgtttcatcaagctccgaacccgaaggaccgaagttgcgctcattgaaaattcatctaagcccattccaacaaggagtggtgccatgactgaatcgccagcggcttccccacacattccagtccacttaccttctttatgagaagcgtcaataacgttcttaattaaacgtaagattgctggattgtatggttgataaaggtatgatacacgttcattcatccgatcagcagccattgtgtattgaatcaagtcgtttgttccgatactaaagaagtcaacttccttagcgaattgatttgccaagacggcgctggctggaatttcaaccatcatcccaacttgtaaatcatcagaaacagtttgaccatcagcaattaatttagctttttcttcttcaagaatgccttttgcttgacggaattctgcgatagttgcgatcattgggaacatgatacgtaacttaccgtagtttgaagcacggagtaaagcacgcaattgtgttctgaaaatatcatcacgatctaaactaatccgcacagcacggtagcctaagaatggattcatttcttcgggtaatggcaagtaaggtaatttcttatccccaccaatgtccattgtccgcacaacaactggtttaccagccataccttccaaaacagtcttataagcttcgaactgatcatcttcactaggtaattcagatgagtccatgtataagaattctgtccggtataagccgattgcttcagcaccgttatcgataacaccatctaaatctttaggtgtcccgatatttgcagcaactgtgaatgtttttccgtcttttgtaacggatttttcattctttaacttttcccattctgctttttgatcagcgaaagcttgcgccttcttatcgtattcagcaatgtctgcatctgtaggattgataataacatccccgttaatcccgtcgacaattaattgttcgccggctttaacagaagttgtgatattttcagtcccaacaattgcaggaatttctaaagaacgagccataatagcagagtgagaagtccgaccaccaatatcagtcacaaaagccttaacgaatttaccgtttaattgggctgtgtcacttggtgtcaagtcatgagcaatcacaattacttcttcatcaattaacgctgggttagggagtgttacccctaataaatgactgagaactcgcttagtaacatccttgatgtcagcagcgcgttcttgcatgtatgcgttatcagtcatagcctcaaaagtggccacgaataaatccgcgatctctttgagcgcttgctcagcattaaccttgtcatcattgattttaccttcgatagcgccggtaaattctgggtctgctaaaatcatcatgtgggcatcaaaaacttgtgcttcttcttcccctagtgatccagcagcaatcttccgaatggtctctagatcactcgtggaagcttgtaaggcattatgcaaacgattaatctctttttctgaatctgaaatagttgatttcgaaaatgacaaatcgggttgcactaacatataggctttcgccgtagcgataccatcactggcagcaatccctcttagttttgtcattattcagataaaccttcctttttcattgtttcttcaattgcgttgattgcgtctgcttcgtcagcaccttcagctgagatagtaacgtcagcaccttggccaacaccgagtgacataacacccatgattgacttcaagtttacagatttacctttgtattctaagttaacatctgagttaaatttgcttgctgtttgtactaataatgtagctggacgtgcgtggatacctgtgtctgctactacgtgaaaatcgcgtttttccatattaatcgatccccttttatctaattatagatttagtttttaacgaaatgagtggtcactagtagtggctacccttccgatatttaagattaccattttttttaaaatactacaatagtttcgctaacaaaattagtagccgtctacactataccgctttcagacttgcggtagattaccgcaccatttcgttgtgcttcgcccacaatttcttttcgatggtcatagttgacccatactttctgaaaatctaaaaattcggactgagcaacctcaatctcagtttgttcgttatttattaaggcatccatctctgctaaaaaatcacgcatctgccattctgcctcctttgcaattcttttatcgtggcttgaaaaattcgttttcattccatctgcgaaataaaacgatgacctcatactaccgcataccgcccatacctgacaagaaacttttattttcgagttgcctgacttgcaactttttttagagatgattataatttggataaaggtcaaagatagtcaagaacactttgacgattctattattaatgaaaggttgtgacagattaatgctttgtcaaaactgccagaagaatcctgcaacgattcatctctatacaagcaccaatggtcaacgacaagaaatcgatctttgtcaaaactgttaccaactcttgaaacaacaaaacagtaatggccaagcaccacaagggcaatatgcagatccatttggctttggaagcctggatagtttcttccgagcaatgggcgcaactcccgatgatcaatcacaagcaaaccaagggccacaaacccaaagtggcggccaaggtggcggcaacaacgggcaaaacggcgaaagtctgctcagtcaatacggtgtaaacctaaccaacttagctaaagctggccaaattgatccagtgatcggtcgcgatgctgaaatcgatcgtgttattgaaattctaaaccgtcggacaaaaaacaatcccgtattaattggtgaagctggggtcggtaaaaccgccgttgtcgaaggcttagctcaaaaaattgccgacgatgacgttcctgccaaacttaaggataaacaagtcattcgcttagatgttgtttcacttgttcaagggaccggtattcgtggtcaattcgaacaacggatgcaacaactgatgactgaattgaagcagaataagcaatacattctcttcattgatgaaattcatgaaattgtgggcgccggtaatgccgaaggtggcatggacgccggtaacgtgttaaaacccgccctcgcccgtggtgaactccaactagtaggggccacaacgaataatgaattccgacaaattgaaaaagacgcggccctcgcccgtcgtctccaacccgtttcagtcaatgaaccttctgttgacgaaacagtccaaattctaaaaggactccaagataaatacgaagcctatcaccaagtccactacacagacgaggcacttaaggcggctgcaaccctttctaatcgttatatccaggatcgtttcttaccagataaggccatcgacttacttgatgaaaccggctctaagaagaacttgacgattaccgttgtcgatccaaaagaaatcgaaaagaaattacaaaatgcggaagctgaaaagcaaagtgcgttaaaggacgaggattacgaaaaggccgcttattaccgcgatcaagtcacaaaattgaccaagatgcgcgaaacaagtgccattgaccaatctgaaatgccaaccgtcaccgacaaagatatggaaaaaatcgttgaagaaaaaacccacattccagttggtgagttaaaggcacaagaacaagcacagttgaagaaccttgctgaaaatcttgaagcgcacgtaattggtcaagattcagcagtcgataaggttgcccgttccattcgtcgcaaccgaattggtttcaacaaatccggtcgaccaatcggttctttcctattcgttggaccaaccggggtcgggaaaactgaattagcaaaacaaatcgccaaagaacttttcggtagcacagatgctatgattcgttttgatatgagcgaatatatggagaaattcagtgtgtcaaaattgattggatcacctcctggctatgttggctatgaagaagcgggtcaattaaccgaacaagttcggcgcaacccatacagcttgatcttactggatgaagttgaaaaagcacatccagacgtcatgcatatgttcctacaaatcttagacgatggtcgtctgacggattcacaaggacggacggtcagcttcaaagacaccatcatcatcatgacttcaaatgccggccaaactgatgccgaagccaatgttggtttcggggcaaccctttctggtcagacacactcgattttaaaccaactacaaaactactttaaacctgaatttttaaaccggtttgatgatatcatcgagttccaaccattaagcaaagaaaatctcttgaagattgtcagtctgatgctcgatcaaacaaatgcgatgattgctgaccaagggttaaacattgccgtaactgaaccagtcaaatcacggcttgtcgatcttggttacaatccagagatgggtgcgcgtccattacgacgtgttattcaagaacaaattgaagatcgcgtggctgactattatctcgatcacccagaacataaacaattgacggctcggttggtggaagatcagattcaaatcaccgatgctaaagagtcacaggtcacagattaaaaggctttattatctcaagttaaaacgaattacgtgccaaatgaagcgttttcagttatactagtggtaagacttaaacatccagggagtgatttagatgcgcttaatcaatgtaaccaattcttataagcgacttgtttcacaacaactcgctgcaacagccgcaacctacgttaaggtttattcacttggtaaaacaacggttcttgactcgcgttcatcgaaggaacgtgagctccttttaaaaaatgatcatcgacatgtccaacaagccgagatcgattttgtattgaaggaactcgccggtttagattccacagatggccttgaagtcttgaatgatggtccattagtcgaaattacaattccaacaccttcaaaaacagtgagttaatcattcgaaccgccccgacatttcattttgttggggcggttttttacataggcaaaataatggcaattgaataggtcgtatcgtataataactttcaacctaatttaggaggattaatgacgcgatgaagacttttcaaaaagagcaccaaattatttgccggttagaagtgggcgacgaaatcctaacagaacttaaatatttggccgcaaccttccccaaccaactgggaactatcacggggattggtgcctgtgatgaagttaccgtcagcgtttattcaccagaaacggatcaatatattgccacttccagtcaagagcaagtagaactgctggcccttagtgggaatgtcgaaaatgcaaatggcacgattgatgtccatctacatgcaagctttgcccgtttagatacaagcgtttttggtgggcatctagaacgcgccgtcatttcacgtacaggagaattaatcgtttccttaattcccgtttccatcggccgcgtcacccatactgcaactaaattacaagtattagatatttaaacgattagaatcactgctatttttgcaggggttcttttttatgcccacttgacgcgttaattatcaaccacactttttgtaatttatgatagactagtagtaataagtaatgcgctacaaggagtccgtatgaatctgattaacctgcttcaatcgttattgaaatggcgcccgaaaaaagcagctcctctaccgaacagtcatgtacgccaaactgtctctgagcaagagcccatccgtcaagcgcctcaatcgtcacagaaacagccggtcgttcccgttagtcaggacgcaacgccactgctggctacgatgtccacacaaccgcgccatagcacagttaccattcactacctcgatcatcatcgggtccctttacgaccaacgatgaccctgacaggtgaagtgggtaccgtgctcaatttgccatggctaaaatttgccggttattacttggcagctattaccaatttaaaacaacagtttcctgaagaaaacaccactatctggcttttttataaaccgcaactcgcagcaccagtaatggtgttacaccagaatttagaaggtggcttgttgattaagccccaatttttatcaggtgctttgaacgaacactatcaagccaatccactagaaggtggtgctaacttcgtgcaccacacctcagctaatcagactggtcgctttacaactaagacacagtttgtccattttaaatatgatccgctgaatttaaaacacagcgatgcacctgaacagcccttcatcgaacttcttgagccaacggatacctatcagcaaccaagtgaagaagcgctgactgctgctcgcttgccaaagcacgcggtttggaagatttatagctgtgcaactgctccatctggcaaacaatggttcaatcttggcagttcttggattacccctacgcgttatcaattacatgccactaatcctaaaggcagtgatgaatcataccaagtaccaaagttcacctaccattacgcagttatcgaaacaacccctctaaacctcagtgcaagtctgaacaacaataccgtaacattttggcaagcaccgtatgaccaacccacaacatatcagatagtgcctaaaacacgggtagtcgttaagcaagtcgttgtactcgataatcaaagtcgctggtgtcaacttaaaacaggtcagtggttaatggaaggcctcctaacttttgactaaatacccccctaaaaaaaataagccgccgattcagacaacagttagtgtgtctgaatcggcggcttatttttgtttgactctttatattatagttttgcggttaattcaacgtctggatacttatcttggaaccaacgttctgcaaattgattttcaaataagaacaatggttcgtcatgaatatcttttaccaatagatttcgtgaggatgacatccgttcatccaattgttctggattgatccaccgcgcagttcttgaaccgattggatccatcaatacttcagaattatattcgtgttgcatccgatattggaacacttcaaattgtaattgaccaacggcgcctaagatataatcgccagttgtgtaagtcttatacaactgaatcgccccttcttgaaccaactgttgaatccctttatggaaggacttttgtttcatcacgttcttggcagtgacgcgcatgaataattcaggggtaaattgagggagtttctcaaatgaaacagcctctttacccgtgtgaatcgtatccccaatttggaaattcccggtatcatataatccaacaatatcgccagcaacagcgcttgtcacttgttcccgtgtgtcggccatgaactcagttgaattgttcaaccgcatcttcttgcctgttcgcgtcaatgtgacatcaattccgcgttggaattcacccgaacaaattcgtacgaacgcaatccggtcacgatgagctggattcatattggcttgaatcttgaagatgaaccctgagaaatcaggagaggttggttcaaccaacgtttcttcttgtgttttgtgtgcttctggggcaggcgctaagttaacgaatgattctaagaacgtcttaaccccaaagttagtcaaagcagagccaaagaagattggtgtttgttcacccgttgcaatcttatcagcatcataggcattgcctgcttcaccgatcaattcgatatcatcaagggcttgtgtgtaaacagaatcttctttcaatggattatcaccggcaatccgacctgcttcatcaagggccaaataagggttggcttcgtcttctggtcgataaagttcgattcgacggttggcgatatcataaaggccacggaggtcttttcccatcccgattggccagttcatagcacagccttcgatgtccaatagttcttccaattcagcaatcaaatcaagtggttcacgaccatcgcgatccaacttattcatgaaggtgaaaatcggaatcccccgcattttgcagactttgaataatttcttggtctgtggttcaatccctttagcagaatcaatgaccatgaccgccgcatcaacagccatcaaagtccgatacgtatcttctgagaaatcttcatgtcccggtgtatccaaaatattaatccgcttgtcgtcataatcaaattgcatcacagaactggtaacggaaatcccacgttgcttttcaatttccatccaatcggacttggcaaattggccactctttttccctttaactgttccggcttgacgaatcacgcccccgaaaagtaagagttgttccgtaatcgttgttttaccagcatccggatgagaaataattgcaaaagtacgacgacgatcaaccgccgtttttaattcagtaggtgtcattataaaatcctttccgttattccaatataatgcgcttgggacaaagaattgcgcaaccattgcgtcaccctttgtcccattgattgtgctcatttaatttagtcgacttcttctggtgcatcggtctctggttctggtaacgttaattgtaaatcaatcaaccgtgaaccggaaaccgaccccgtcgttaagctcatgccacctggcagctcaattgtttccggatgaccactgactggaatggcaccaatttcagtaatcacgaacccggcaattgtatccacatcagtgacttgaatatctgtattgaaggcactgttaaattcattgattggcatacttcccataacggtgtaatgctgcgcatcaattttttggtacaattcttcagctttatcagattcatcatcgatttcaccaacaatttcttccaataaatcttcaatcgtggctaagccaacaacgccaccgtattcatccaacagaattgccatttgttgctgtgtgcgtttcatttcaaataataaatcatcaattgtaatcgtttcgggaacaaaaagaggttctttcattaccgcttcgatttgcatggcctgaaaacctttttggcgtgcttctttcaagagattcttgatatgcacgacccccaccacttgatccttatcatcccgataaaccggaatgcgggagaatggttgggctaagatggcatcgatgttttgatcgttgtctgcacaaatatcaatcataaatgcatcagtccgcggtaccatgacttcgcgcgccatcttcttattgagggtaataatcccctctaacatttcgtattcatcggtttccagaacaccggcactcttcccagattcaatcatgtggaccatttcttctcgggtgagcttcggttctgtttctgaaaaatcaattggtgtcaacttcattaagagcgaggtcgacattgatagcaaccacacgaatggtcgcagtaagataccgacgatccgcacgggttgcaccgttattttagcaattgcttctgcacgatgcagtgcaacttgcttaggatataattccccaaaaaccagggatacataggataagacaatcgtcacaattaatacggccgcttcctttgtccaagccgcatttcctaaaaggggtgctaatctacccgcaatggttgtggcagcactcgctgaagataagaagcccgcaaacgtaatcgcaacttgaattgttgctaaaaactgattggaatgacctaagacttgaactaatactcgcgccttcttgtcacctttattggcttgctcctccatcttcacacgacttagtgacacaagtgcaatttctgccgcagcaaaaaaagcattcactaaggtcaaaattaatatcaacagtaactgtccccacaccgaacttccagggtcaggattcatcgtcacatccactacctttcattatctaaataagtacatttagccgaatatggcctaccttgcagtatagcatagtcaaaaatggaaattcaacctgcatcttttaaaggtcggtcccttttttagctttagtccgtaacgcttgaatatcatataaataagtaatcactgtcttggtaacagcataaaacggaatcgctaaaatcatgcctaaaatcccataaatattcccagcgaccaataagataatgatgatggttagcggatgaatatctaatgaacggccaatcacgttaggataaatcaagttcccatcgatttgttgaacaacaatgacgacaacaatcaccatgattgttttgggaatcgaaattgataaactgataatcaacgcgggcgcaatcccaatataaggccctaagtatggaattacgttagaaacgccagcaataaatcctaacaaataagcgtatggcatcccgataatgagataaccaataaatgtaaagacgccaacgaataaacactctagagcttgaccaccgatataagctgaaatcgtcgcccccatcttccgaagcaagtccgccacttggtcgttataacgatcaggtaacatcttttgaatattaggcactaaacggtgtccgtcttttaacatatagaacaacataattggaatcgtgaagacactaactgtaacgctcgtaatcgcaccaatcatactaccaaaaccagatgtgaaactcttcataactttttcagcaatcttcgatggttttaaatctaactgattgacgtatttattgaagtcaatgtttttcaagcgcggattgctagataaatcatccgctactttttgcagtcgatgagcaaaatctggtaggttcgtcacaagttgtgtgatttgtttaatcaagttaggaatcacagtggctacaatgaaaattaaaccgccaaaaaagacgatgaagataatcgtaatcgcccagttgcgtgatattttgagtttacctaacagattgattagcgggttaaacaggtaaaataatagtcccgcgccaataattggcccaaataaagttgaaataaaggtgccaattggatcaaataagaaactaattttggtgcaaacaaagattaacacagccaaaatcaaaagctcaattgaccaaaataatagttttgattggcgtaaacgatcaaacatgcagtatccccccagtgtgcctatgtcacacaaaacgcattttatgctatcatagtgtaacgattattgttattgtaccaaattttatagtgatacacattgattattccttttgaagaggtggttttttaatgttagtgaaacaaactcgtgatttaaaaagtacggtttatcaagatagtttggcaattcggcaagccgtattcattgttgaacaacacgtgcctgctgaacttgagattgatgaattcgaagaccaagcgatttattttgtcggctacgttgctgatcaagccgttgtgacgttgcggctcatcgaagcggactcagattatcatgttcaacgtgtcgcagttagccgttcagcacggcatcatggttatggtcaagaactgatgcgtgccgctgaagtttttgctcgggaatcaggcaaagcaacgctcactttaaatgctcaattaagtgcagtaccgttctatacgcagcttaattttcaagcaaccgccaaaccacagttcctagatgccgggattatgcatcaagaaatggttaaaaaattaactgactaattgtcatttcaccactaaatgacttataatgaacacagcttaataacagaaaggacgttaccatgcctaagcaaaaatcacttcttgtccacttatttttcttcattatcccttatctactcgtcattacgattgccgcaacggcttacgacagtcttgtgattcacagtgccacttgggatcgcaccttgttcagtgctctaatcagcagcaccctaatgttatttattaaagttccaatcgaacgaccgttgacgattatggctgacttagcccctaaccaaacacttaaaatggtaacaagtttcttcctagtagaacgttcacttggtattaagattgctaacttcatttttgatggcattcttttctgccttgcaacctatctgttacgccacttcttaccactcaacatcattgctggtagtttactcggctggtgcgtcttcgcgcttttgctatccatcagcatcggtgctggcatcggctttaaaacattaacgattcaacaagatacttcagtcgaaaacgattaacccatacaaaaaagctccagtcaatcaatgactggggcttttttgcttgagactaaatagtgttctaacgacggtgcgccaattcttgataccggttataccaaatatcaatgtattccttcgaaaagggccctttgccattgttgatccaatcaaccaaaaccttaacgttggcttttaaaatccgatcagtttcggcggaataatgccattgcgcactgtgcgcttcatattcatcgacatctagaagccgtttttcgccattggggaaaaccttcacatctaaatcataatcgatatacttaagcgcctcttgatccatgacatgcggcgatgccaaattacaataataagaaacgccgccctcacgaatcattgccaccacgttaaaccaatacttcttatggaaataaataagtgccggctcccgcgtgacccactttctgccgtctgactctgtaactaaggtatgatcgttacaaccaatgactgcgttctcgctggttttcaaaaccatcgtatcgcgccaagtgcggtgtaaactcccatcgtgtttataactttgaatcgctatatagtcgccttctttgggaatactcatcgacatacccagctttccaaggttattattcataatcatctatcattatagcaaagactcgcaaatttacctaaaactttctaccattaattggttgccaaacgtgccgctaacttcttttgcacagtcggtaatgcaacgtcagctaattgtgcctcggtataccattggcctgggaaaaaggcgaggtcggcatctgctgcaagttgtgcttctaaaagggtaattgtccatttaagatgcgtaaaaacgtgcaccacaggttttaaacctgattcatgtaattgctgcaattctagtgcaaaagcctctttaaaataagtttcgatacgagctaattgttcttccggtgtcaataattcatcgtcagttacttgcaagtcttccgcagcgactagtggataagtggacaggttcgctaataaaccggtactcggtcgtttttgaaataataagcccttttgcgagcgaatcacaactgcaaacatcgcaaccggtttttgttttgctttcttcgtcttgactggataatccaataaggtgccatcttgataactccggaaaaacggtgctaacgccgtctcaccaaccgttggattctttgccgtacaaacttgcgagccaaaatccatcacggcttggttaaagtcacctgggcgatctttgggaatcagcggtaaaatcgcatcgtaaaaaatgtggcggttctttgggttggcaatatcagcatcgattttcaataaccgactgaacacccgaaaagcattgccatcgattgccgggacgacttcgccaaaacaaatactggcgatagcgcccgctgtgtacggtccaatcccggctaacttttctaattcagccgcggttgttggccactgaccattgtaatcgtcgacgacttggcgcgctgctttttgtaagttacgcgcgcgcgaataataaccaagtccctcccacgttttcattaataagtcctctggagcggccgctaagtctgccaccgttggaaaagtcgccaaaaaccgttcatagtacggaatcactgtttgaacctgcgtttgctggagcatgatttcagatagccagacacgatagggctcttgattctggcgccaaggcaagtcccggcgattttcatcataccaagtcataaacgcggtttgaaacgcgccccgttcactcggtgtcatctgatagttcttgttcgtcgatgaagtggttgattgcatcaatattaaatcctttccgatacaacgcttgttgcatcttcatccggcgttctcgtggttcgagtaatcgataacggcgccatttttttgcaccaagttcagcaagcgcgtcagcttcactatcttcatcggcttcaagggccaacgcttcaataattaaactaaggctgtcaccgccaaaccctttttgcattaaaccttgtttgactttttgctgctgttcaaagaatgaactatgacggtatttcttcgccaacttcttagcagctgctaacccaaccgcaacttgatcatccactgaataatgactaagtgcttgatcgatatgggcagcactaacgcctttttggattaatttctggcggaccactttggggcccttatccgcggtattaatcacagtacgaacgtagctatcggcgtaatcctgatcgtcgatataatgtaactcgcgtagttttgccaagctagtctggatcccttctggagtgatctcgtgttcgcgtaaatattgcgttagttccttttccgtccgcaattggtgactcagataattgagcgccaattgatacgctttggcattatcatcgtctttttgaatgtcgcgttgcagttgactatcaatctctaaatcctttgctaaacggtatttaatcaagacactctcggtcacgccgaaagcgaattgctcatcgataaaaatattataacggcctgattttttctgtgccgttattttggtaatcttcggcatgttattctcccttgttacgtgttgctttgatgtttaaatagactttaaatccaatgaccacgacggcgagcactaaagtcccgatgatcagtggtaagctcttgtgttggaaggcataaacgccaattccgagtacaatcagcatggcgattaaaaattgatttcgttcccaaaaattcatgtggcttcgctccttactttgacttcctgtagcatagcataaatggcgcacccggacaaaagtcactgcttaattcccactattgaagcgatttttcagtgctaagtctgttatactgaatgcaatgagaaaaacgagtatcattattttatattaataggagcggattaaatgccagaacaaacaaaccaagtcgaagtcggccaacgttttccattgacgattaaacgaatcggcatcaatggtgaagggattggctattacaaacgcaaaattgtctttattccaggcgcacttcctgaagaagtggttgtcgcagaagtcaccaacgttgcccctcgtttcattgaagcaaaagtccacaaacttcgccaagcttcaccacaacgggttacccctaaggatgccacttacggccaagtcggtgggattgagcttgaacacttaagctatcctggccaacttgccttcaaaaaagacgtcgtcgtccaagcgcttgaaaaattcaaaccacaaggctacgccaaatacaatattaccgatacagtcggaatggaaaacccctggcattatcgcaacaaagcacaattccaagtccgcgaaatcgacggtcatttagcagctggcttatacgctccaagtagccatactttaattgatttgcctgaattcgcaacccaaaccgatttaacaatgaaaatcatccgaaccgtcttgaaattagtcgaatcactcggaattcccgtctttgatgaaactaagaatgccgggattttaaaaacattggtcgttcgcgaatctttttcaaccggtgaagcgcaactgaccttcattaccaactcccctaaactaccgcaaaagcacgccttgattacagccatccaagctgaattgcccgaagtggtttcaatcatgcaaaatatcaacaaagggaaaaacgtgctcgtttggggcgaccaaacgattcatctggctggtcaagaaacgattatggaaactttaaacggcgttcacttcgaattgactgcccgcgcctttttccaattgaacccagttcaaacggctaagatgtataacttagttcaagatgcacttgatctcacacctgaagatcgcctcgtcgatgcttattgtggggtgggtacaattggcttgagtcttgccaatcaagtcgcagaagtacgcggcatggacacgattgccgattcaattgaagcggctaaacacaacgcagccatcaatgacattcaaaacgttgaatatgccgtaggggctgccgaagacctcctcccagaatggttggataatggctttgtcccaactgccttggtggttgacccaccacgcactggcttagatcaaaaattaattgatgccattttagacagtcggccattgaaatttgtctacgtctcatgtaatccatcaacccttgcacgggatttaaaagcccttgtgcatacgtaccaagtggaaaaaatccaaccattggacatgttcccccaaacggcacgagttgaagcagttgtgacattaacactaaaacgcgacctataacgcaaaaaagcggtccatcaacatgtgtttgttgatggaccgcttttttatttggactttaatcgcctaaacgtgttctataagtcatatccttccggttaaccctgaatggcaaacgattgcttcacaatcattcgccaaacttcgttaatgctcagaccgtttcggttgtgacgcactctttcttaagaagaaagcaactagtggattgtcgctgttggttgtaatcgtgtctgttttcaataacgtgattataaataaagttaaaccgatcaacgccgaaattaacgtccatgcgcgcccctgattgcccgatgtaaaacgggatgcaaacccgttcaataaccacaatacaactgctccgcgaccatttaacccagcatcccgataacgccgtacactaagcgccaacgttggaataaacgtgagtaccccaagcaacccgataacgattatgtacagcactaatgcaccgctcatcttcagttgcacctttgcagcttgtgcaaatagcaaagcgaaaaatggcatgaaccaaacaatcattaaaatcaacatcgcccaccaataacccgcacgtgttgttcgccccgtaaaatcaaaataacctttaaaataatctcgccaagctgacttaaacgttacttgccctggtgtttcttgaatctcgcgcattgtgaatccccttccaaaactgattaacttaattgtacagcatttcaccactaatttgatacaataaaggaaatcaacttggaggaattcttatgaaaatttatttcgcaaacgctctattctcagcagcagactttgattataacgctaaggttgttgctcaactgcgccaatcgattcctggtgtcgatatctatctcccacaagaaaacgccgcaattaatgacaagaatgcttatgccagctctgaaatgatcgcacaagccgatacagacgaactcgttgctagcgatctcgtcattgctgttttggatggtcccaccatcgatgttggcgttgctagtgaaatcggtgtggcatacggtcgccaaattccaatgatcggattatacaccgacagccgccaacaaggtgctacaaatccacaaaaactagcggctttacaagagatcgccgaaaaccaattccattacttaaacctttacacaaccggcttaattaaacaaaacggcacgattgtgaataatttagacgcgttgattgaggcagtgcaagcccacgcctaattaaaaataaagccattcatttgttatctatagtgaatggctatttatattgtattttgagcataaaaaaaaggattcaagctttgatatgcttgaatcccctaggttgaggttgatagcttggttgttacgagctgattctgttttacattctggataatgttacacctcatactttattcaattgtttttaatcgttggtctagcccactgctaatcgtttcactcgatctagtttggtcgtctatctttgacccgcatgtgcagttttagcgatgacgattaaattcgtgtttactacttgagcgatattctttaacagacatcagcctccgatatacttagatcttaatactacgaagagttacacttatgtttccattggaaccacgccttgcaatttctttttcgtactttaaatcttgatgtgtcgtacattcaaatctggtgcttgtgttttaaagtggtaaatctatttaaagctaacttggtttcacttaccaagctatctttcctcaccattaatatagcaccttctgtgaccggatacaatcaaaatgctcttaaatttaaaaaagtttttccatcatttctgacttgttatttttatcagaaatagctaaaaaaactgccattaacaatactgttaatggcagtttttaggatacatagctgttttttattaatctctaacttgataattgcgttcgtgttccttaacaccttttaaaatgattgacgcgttgtccattgccaaatcaatttcatattcgctaccgtcttctggtagttctgcttggaattgattttcgtattcagccatcgtcaattgacgtcgtgcagcaagcattgctttgtggtccgcaccggctaattgtttttcaaatccgggttgcaaaataccggtgaagaattcactgatcgcacctgaaccgtaactgaataaaccaattcgatcgccggctgccaattgcgttgattgttccaataatgaaaggaagcctaggtataacgcaccggtgtagatattaccaatttgacggctatacaatgtactttcttgataacggtctaataaatgtgcttgttctgcttccgttgctcctggcaggattgtccgcaatgccttcaaacccatctttgtgtatggtaaatggaacgttaaggctttgaaatctgaaattgtgcggccagtttgagcgcgatagtctgcccaagttgcttggaaaaattcgatgtattgttcagttgaatatttgccacgcgcaaaagcttcttttgaatagttggggcgccagaaatcttgaatgtcatcactgtggatggccgttgccggttctaacgccaacaaacgtggtgctgcactaacgatcattgcaaccgcgccggcaccttgtgtcacttcacctggtgtatccagcccataacgggcaatgtcagaaccgatgactaatgctttttgctctggatgtgccgctacaaagtcataagcggtcatcaaaccagcggttgcaccgtaacaagcttctttaatttcaaaagcacgggcattttttaatcctaataagcgttgtacataaagggcgccggcttttgactgatcgattcctgattcagtgcctaaaattaataaaccaattgaatcacgattatcatcatccaacacttcaagagccgcgttagccgccattgtgacactgtcttgactgaggggggcaattgccatttgatcttgaccaattccaattgtgtatttgtcaggatcaacgcctcgcgcgttagctagcatcactaaatctaagtaggtattaggcgtaaaaaggcccatcttatcaattccgatttgcataataaacttccaatctatttgttttcagcacgcagttgcgctaacagctcggttgctgttgctgtatttaaatgtgtcgctttcaataataatggtaataattgcgttaattcagtctcggttgcgccagcggcaatcgccaacgacttcgcttgaagcgccatgtgtcctttttgaatcccgtctgacacaagtgctttgagcgcggcaaaattttgtgctaagccaacagctgcgataatgccggctaattcacgcgcattctgaacttttaacaagcgctgattaatctgcacggttggtagaataccaatcgatccgccaaccatcccaactggcagtggcagttcgattcgaccgcgtagttgctgatcagttgtccattcccaactcgaaagcggttgataagcaccctttctagcagcataactatgcacgccggcttcaattgcgcgccaatcgttgcccgtcgctaacaccactgcatcgatgccgttcataatccctttattgtgggttgctgcgcgcgccacatccactttggcaaagtcactcgccgcaatcatcttttcggcaattgtttcgccagcaagcgtcgcagttgttaaggtagctggatcaatcgtcacacttgcggtcaccacggattcaaacgcggcattggtcaaaacactcaataaaaggttgccgcccaactgttcttgcacagcatgtgcgatcgcttcacagattgtgttcacaatgttggcacccatcgcttctttggtatcaatttgcaattcaagtttcaaaaagcggtcgtcaataatcgtcggcgtgattttttgaagaccaccaccgcgtttaacaattgatggatgcgcagcccgtgcaacttcaaataaatggtcattgttgccactaatccaagctttagccgctactaagtcaactagcttctctaacacgacttcaccagtcatcagccgcgtcagttgttcagtcacaaagccgccattagctcgtgccatcttagccgcattattagccgccgcgataacggatggttcttcgatcgcaaacgggacttgatagacttgctgattgactaataaatcttgcaccacaccaagcggtacttggtactggccaatttggttttcaatcatattaccagcgatctcatctgacaagggttctgcagctgctaaacaatcagcatccgtctgacttaggtgaccttgttcaacaagcgttgctaaacgttcatccttcgttaattgatagaacttaggctttttcattacaccatgcctcatttaattgaatttcaaaagcaattcctaacccgccaccaatacataacgaagcaatccctgttgtttggtgcgtccgtttcaattggtgtattaacgttgtcatgatgcgcgtgcctgaagcaccgattggatggcccaacgcaatagcgccaccggccacattaactttagcaggatcgacttgtaacccattttgaacggccacacttgaagcggcaaacgcttcgttaatttccaataaatcgatatcggctaatgtttgattttgttgcgctaataatttttgaattgcatcgaccggcgtgtaccccatgtaatctggatcagcaccgacttcttgatagccgaccaaagtggcttggtaaactaatccgagtgcagcagctttttccttgctcataacgatcatggcagaagcgccatcgttaatgccggaagcattggcaggtgttacagtcccatcttgttgaaaagctgggcgcaacttcgccattgcttcgatggttgtcgttgggcggataccttcatcttgttgtacttcaagcgttgctttgcgttgttgcaccgttacaggtacaatttcttcattaaaccaaccagcttgggtcgcttgcgcggctttttgatgagaagcgagtgcaaaagcgtcttgcatttcacgcgtaacgccgtatttagctgctacattttcgcctgtaatccccattggctggtgcgtaaacgcatcgtttaacccttcgctactgatgctatcaatcattgtttgatccccaaatttactcccaaaacgcatttgtttattcaaataaggcgcttgtgacatactttctgtaccgccaactaagacgatgtcagcatcgcccatgacgattgcactctgcgccaaccgaattgcttttaggccggagccacaaacttcattaactgtcattgctgtgcttgattgtgtcatcccactcttcaaagcgatttgccgtgcaacgttttgcccagaaccggcttgtaagacattcccgaaaattgcttgatcaatctgagttggatcaatcccggctgcttcaatcgccgctttagcagcaactgtccccaattcaaccgcgcttaaacttgcaagttggccccccaatttaccaatcggtgtccgctttgcactgataataaccacttcttgcataatatccctcttcatctataagtctaattattactataactaaattttcatgaaacgtctggtaattcacaatttctttaacttttttttagaaatccgcttggtaagctgagattattttaccattttatcggcatcgtgcattactcattagcgtaagtcattcaccggtgacgcttacaactaatctttaggaggaatccacatgcaaacatcatggttagcaacatcgatcgcttttgaattacaaaatacagactatccaaatgaaagtttacaacgtcgtatgaccgccgtaaaagaagacgttcaagccacggaaatccaaacagttggcgaagccctcgcaagtctccacgcaggtgacacatttgcaacagctactctaaccactaaatccgcttatatcgctaaataaaaaacataccaatctttgaggaggaattcaagatgaaacaactttgcttagaatttaaaaacagtgatgctaagagtcgtgtattgcgcttaaacaatattgatgacaacttagacgccgaaacagttagaagtgcgatgactaaaatcgcagcagccaatatgtttattaaaaaaggaattgaactctacaaagaaccagttggtgccaaatacgttgaacagattgaaacaccaatcttttctgacaaataattaagcagcatacagcccccaaatcgaatctgatttgggggcttttttttgcgttttacataaattgattaacaccccttgtttccgcgataaactttggtgtaggcttacataaagtcgttcaaaggagttatcatgcccaattcatttaacttatcgcaaatattgcaatcaatgttacttaattgtttactggtaattgcgctaccactagcttttgccgggattttaacactaatcaatcgttcaactaaacggcgcttagcccattggtgggattactcacaacttttaattggcggcctaggcaccgtgattcatgaactcagccatgctgttgcctgtttaatcttccaacaccaaattatcgatatgcaactcttaaaattaaatctacgggataatcccgatcactcgcttggccatgtcaatcaccgataccattccggccgtctttggccaacaattggtaatctctggattgggattgccccgatttttggttgttcagccgccattttcggactgacttggttattagcacggcccacttttgcaacgtggatgacctttgctgaacatcccacttggcagttaaacgccatcggtcccttattcagccagctctggacgacgcaaccgggtgctctcttgctctggttaatcttaactagcatgattgccatcggtggttatgacttatccgcagctgattttaaaggtacgattccagggattattgccacagtcattgcggtctgcctcgttactggtctgttttcatttgtgccaacagtcaacaccacgacttggctcattggtgttctaacaccaatggcaattatcctaaccatcgccgctagcttgtcgggtgtttgttggctgattattgccgggattttcgcactattagaaaggacgacttatcatgcgcgtcattgacttactacagctattagctgatacacccaaaaacgatggcatctacttcgaaggccctgaagagctccaacctatcgcccactttgagctcgccgtcgttgacgaacagccacgactattactgcagttaaaggccgcagacaaaaagccgctgaagcagtgggaatttagcctattattaaatcaaaaaaactactaccaacattatatgtatgtccaaacaaagacgggggactatcctttgtttggttttcgcgttgctgctgacaaaattctactcggataatgtttgttcaagttgcgttaaataacgatgactcgcaatcatttctcgtgcatcattttgatcggctaattgaatctcatagatcgaactggcatcaggatttaacaatggcaatacgcgggcccagtcaattttgccagtccctaattgcaacccatcatgcttcaaacccatcgaatcaaccagatgataatgaacaacgtgctcacgcaaagttgccagactctgcaagaaagcattctgatcaccctgcaacttgataaaacaatgactcgtatcaaacgctaagcggtaacctttatcaaagatggcctgatcaaaaatcggattgccataatagaaaatcggtgaaattgaattttcgaacataatattttgtccgccaatccgctgtaaataatcgaggcgcttgaacaaaacacgaatggcatccgtaatattactgtaacccgtcgtcaattcttcaattggatcatcataagagccatgcaccaatagttggacatcttcagctttcgctaactgcaataaatcgagtgttgattgccataaaaagcggtatcgggctggcgaacttgcttcattcatcgacagttcaatatgatgcccttcgaaactcattgggtggtgtaaaataatccgttcaacctgctgactgcgtacataacgaattttttcgcgtaagcgtactagcccatttggcgtgacatcttcggctgttaaatgaaattcaaaatacgttggctgatactgcattcgatcagcaatttgctgatcgttaatccctgcttttaagcctaaccgcatcgtaatccctcttttctctactagttcctatttctattctaacattctaaagacctaagaatcgtaaaagcggctcaccaagtaatggtgggccgcttttttggttggcgttaaacgtgctttttgaaacacacgctatgcatttagtaccttgttcaggaagtcttttgttctttcgttttgtggggtgtcaaagatttcctgtggtgtgccttgttcgacaatgtgtccatctgccatgaagatgacgcggtcggccacttctttggcaaagcccatttcgtgagtcacgacaaccatcgtcatcccttctttggctaaccgcttcataacggccaacacgtcgccgaccatttcaggatcgagcgctgatgttggttcgtcgaacaagagaatatcaggtttcatcgctaaggcacgcgcaatggcgacccgttgtttttgcccacctgatagcgattgtggttttgcatcgaatttctctgataaaccaaccgtttcaagtagtttcttggcggtttcttttgcttctgccggcgtcattttaccgagttccactggtgcgagtgtaatattttcagcgaccgttagatttttgaaaagattaaagtgttggaataccatcccgattttttcgcgaatttggttcaaatcactcttaggatcactgaggttgtacccatcaacgataatctcaccactcgtgggttcttctaagcgattcaagcagcgcaagaacgtgctctttcctgaacctgaggggccgatcatgacaaccacttcattatcaccgaccgttaagtccaaatcttttaacacttcgttactgccgtaattcttaataagatgagacacttcaattctattcattagttatctattctcccctcaatgtacttcgataaccacgtgagtaacgtgataacgatcagatagattaaggcaatcattgcccaaattttgaacccttcaaggttgcgggcgatgataattttacccgtctgtgtcaattcgagaatcccgatgattgataaaattgacgtatctttcaatgtgatgatgaattggttaatgaaggatggaatcataatgcggatcccttgtggtaacacaacgcgccgcattgctttaccatatggtaaccctaaactccgcgctgcttccatttgtccggtgctaaccgcgccaatgccccctttgacaaaggctgcagtataagccccttcattgaacatcagcgtgatgaccccagccacaatcgctggaatcttctgcccagttaaacttggaatcccagtatagatgaataatgcaagcaccaagaggggtaacccacggaaaatatagatgaccgtatctgaaacgctacgcgcaaaccggttaggtaatacgccgagtaatccgaagaaaaccccgaaaatcgttgcgaagaaaatcgcaatgactgttaataataacgtctggcctaaaccgctcaacaacgcatctttattttctttcaataatccaaaaaagctgtgatcaacggttgcttttttagttgattctgtacttaaatattttgctttaattttgtcgtattgaccatttgcttttaatttagcaagacctttattgaatttagcgatgagttcaggattgctccctttcttaacggcaaatccatattcgccaccttgagcaggtttggtgacaatcttgagtttcaagcccgtcttaatcccatattgcataacgggctcgtcttcaaaacaggctgccgaattaccattcacaacatcattatacatattatctgaatcatcaaacgtaacggtggtaaagccatattctttcgctttggccgtcgcataggccccagcggcagtccctgttttaatcgcaacacgtttaccgcgcaacccttctaagcctttaatcttactgtccttttgaacggccattacaaccccggtcttgtagtaaggatcagcgaaatcgaattttgcttgccgttcaggtgtaattgtcatcccggcaatcacgccgtcaatttgttccgactgaacggcttgaaccgctgcgttgaagcccaacggtttaatattcactttaaagccctcggacttcgcaactgccttcatgatatcaatatcaataccgacatattgattcttctcattcgcaaactcgaatggtggataggtcacatccgtaccgatttcataagttttttcagcggcttgaacctgattattcacttgactcccaaatacaaataagcctgcgagtaaacagctgcctaaaaatacgagtaatttcttcatgtgatcctcccttaatgcctgaccaacttctctcatcgctcttaacgcgttattaagattagattagacgttttataatagtatgttaataattataagcataaaatccaaatttgtcgaattttttaccacaatattgaaaagcagactctaatccctaaataatcgcattaaaaaagcccgcagataaggcggactttcactaaatgagaattgaatgagtttattttctgctataatggaagaactactactcaaggagtctactatgattaaacccattatgcgtgacacgcaattcttagctcaaaaagcagttccagcaacaccagctgataccgatgtgatgactgatttacgtgatactttacaagccaacacagaacgttgcgtcggaatggctgccaacatgattggcatcaataaacggattatcatcgttcaaatgggcgtcttacctgtgattcttgtgaatccacagattgtgcgccaagccaaaccttatcaaacgactgaaggctgcctctcattaaacggagaacgtccgacaacgcgttatgaaacaatcgaggtcacttatcaagaccaagccttcaaaccgcataggcgagctttctcaggctggattgctcagattatccaacatgaagtggatcactgtgagggccgtattatttaaaaaacaacaaaaaacgttcaaccattccaatgttcggagtggttgaacgttttttacaggttatttattttcttttttagtgtctttttttaattcttctgctaagtcgatgatgtatttcttcaaatcatctttcacttctgggtgttttaacccatattcgatacttgtttctaggtaaccgaacttgttcccaacatcgtaacgacggcctttgaattcatgggcgaagacgcgttgggtcttgttcaattcatcaatcgcatcggttaattgaatttcaccaccaagacccggtttttggttttctaaaatatcaaaaatttcaggcgttaacaggtaacgaccaatgattgctaaatcactaggtgccttatcaacagctggtttttcaacgaagttcttaacgttgtataaatcatctttaactttgttttctgggttaatcacgccgtatttgtccacttcattatgtggcaccttcataacggctaattgtgatgcatgtgtttcttcatattcattgattagttgtttactcaatggcaccttatcttccatcaagtcatcacctaacataacgataaaaggttcgtcagcaacgaatgattttgcaaggcgcactgcatcccctaatccgtttggatgtgattggcgaatgaagtacaagttaacccccatatcagtcgtttcgttgaccatcttcaacatagcggtcttattcttggctttcaagttttgttccaactctggtgctgaatcaaagtgatcttcaattgggcgtttgcctttaccagtgataattaagatatcttcaatccctgaagcctttgcttcttccacgataaattgaatcgttggtttatcaacaattggcaacatttccttcgccatcgctttggtagctggtaaaaaacgagtgcctaatccggctgctggaataactgctttacgtactttcatctactaaaatcccccataacatatagtctaataacagtatgccataaaaaagtggatttgcaccaattatatgccgaaaatgaggaaaagattaacaagcacttaggattttatcaatcttttcacaattgttttgtaagcgattcccatcattggtattctcaagaggttaacaataaaggaggtcttcgatgtttctactacatcccaaacatgtcaatacatcccatgaatgtcttcccgtgccactcatcatcaaacgtggtattgattataacttctgtgagctggatcaatcgtcaattccccgttcttaccaaactagtattacgagtgacacaatggtgattattccctataaaaaatcgcaaagtcttgtgttagaccgcataaccggtctccaaattagtccgcgttctacccggcaactaatgcgcgcttataatcgccatcagatcatggacttctcacaaccccggtacctttgccattgtttcaattggtatcgtaagattccacacatcaatggcgaatatcagtatttaccattaagtggcacggctcatcaaaacgcaccgtggttagcgctccactacgtccgtgattacgaagttagcgataaccatctctacgtgacattgctaaatgactgtacctgtatcctcccttataaaggccgtcaaatcgatactgaaattcatcaatgtgcagccattggcaaagtccaacttggctgtctcactgtgtgtgccactaatttcggctatcaaatcaagctcaagacttgtttcaagccaagcatcgtccatcgcttcgatgattgccattgccatctgtgctcgaatgttccgaaaacagctactgaactactcggattactcaacgcacttgaaatgcaaaaggaaaatttcatttaccaagccgtaatccatgaataccccgaattcagcgtatttgacattcagtgctatatcaaaagtgttaaagcactaattcaaaaattacgccaattataaattaacccgaagtcgctatttacaatagttttcatttgtatttcaatgcatttgcgcaaattaaagctgaaacggattgatttaccgctaaaatcggcgattacccttccttatgcaaacccgctatagtgaacttaccggtaattcacactgtgagctcatagtagacaggatgcttgacaatgacccgatcagatttacaaactgcctttgattttattacacaagacgacaccctcatctatggtgttctcaaagatctccacgttccacggcagcgcaataacttcgccgatctctaccaaattggcgtgattgcctttgtcgaagcctacgatcatttcccaggcaatattgaagtcgaaacccaccgcttcatggtttacgcgtatcaggctgttaaatgggcaattatgatgaccttccgcaaggataataaccacgacaagcgaatcggcttcgttaaccggataaacgatgatgattccgtgatggactacctcgaccaagtcgcagatccctactgcaacccagaagacgccgccatctgcaacgacctcttcgaacgcctctatcaagtctgtaccccacgcgaaaaacgcttcttagtcctccgctacttctacaacgccagcctaaaagaaatcgccgcagacttaaacatcacacggcgaacagccaataatattaaatttatggtgcaaaagaagtttagtgcgttattagtataattaaaaaaggtgagcaatcatatgattactcacctttttaattatactaatcgatttttgccataaatttttgtaatgcatcttgccaggttggtacttcaaatccagttgccttaatcttcgttaattagctaaaagtatttggctaacttgattataaaacgcgcgatttttatttggaggttcttattatgtttaatggtctattcaaagatctaacaccaaggtcgtttactggtactgcgtcgagttattattagtatcgtgggtctctgtgtcttttcagctttctttattatctttggtgctaaagtaacttttgaaattcttgcaatatttgctcgagatacgactacatttgtcactgtgttgctttacttgctttcattatttatttttttaatcgggttcaaaaccaagattactcaaattagtgttgttacagcttggattagtgaagtacagtttttatttttgttattctcgccaatttggcaaattcacgctggaagagaagttgcgttctatgttattttggctatgaggattctggtcacagtattactggcatttcttttgtatctatatcatcgcaacaataaagcaaatcgaaaataccgtcgataacttaatacaaaaaaataggctagcccttgagggactagcctatttgaatatcatcaataaaaatcgcgttcaaattgcattaaatcattgattaaagacgctgcttgcttcaattcagcatctttatatttttcggtcaccttatcaataacttgcgctttcagcgtttcatgcattttatcgtggctttgcgcaatcacacggcctttagcggtcaaagaataatagatttttttctgatcatctggttttttagtcgcttgaattaagcccatttgaatcaacttcttagcggcgcgtgtaatgccgccacgcgtaaccgccaaccgatccgctagtgctacacctgttaattcttcggcctctaatcctgataatatgtgcaatgcaatgattgatagctgcggaatcatcgttttcaagttctcatcactcagctgattttgcaaccatttttgttcttgaacaccgcggccgttgacactatctgagcgtaattgcttgattgcatgatagagtgccatcactgattcgttttccatttgcttaacctctcatcaattgttaccaccagtatacaccaaattagaatactttagctttggtcgtcgcttccgttagggcccgtgctaatatttgttcacgttgatctgcatgagcatccgcgccttcaatatagacgtgttcaacttgattaacaccatagaatttcaacatattggttaaatacatatcgcctaaatccataagtgcagaactttcgttactcttaatcttaaataaacggcggaacaagaacttaacgatcccccacttgcccccagcgtgataaacactgccagctgcttggatatggattgctttcttaccttctaacaaacctactgaaccgttcggtgtgtatttgaatgttttgtgggcgaccgccgtcaaatctaaatattgtttcatctcagctggtaaaaaatgattgtacattggattgatgaagacatatttatcagcttcgataaattcatctaaccaatctgcgtgttgttgtaatagtgttttctcagcttcagccattggttcgtcaaatttttgtttacgccatgcagccattgtcatatcgttcaatggtggaacacccgcttcagtatatagatctcgaataataatttgatcatcaggatgggtccgacgataagtttctacaaagcgggtccctaccgctagggataaactcttttcaacatggggatgtgcttggattactaataatgtactcatttaaaaaaaccttctttagtttcgtttagttgcttgtcaacaaaataaagattatcatcgttttagttgcttgtcaacaaaatgttttaaattaccgttagctatcaaatttagctgaagtgccctagtagcgccctaacgtgtcatttttaagcaaaaaaaataggctatcccttgagggactagcctatttgtgtaagcttattaaacatgctttttaaagctgactcctgcgcttagctacaatccgcaaacaatcgactaacgtcgattattcacgaatttaggctaatgctcagaatcaacccgctttaaacacactctttaataattagtttaatttcttcttgcttactacgtttaagttttcgtctaaatcataaacaactggttcgcctgttgccatttcaacgtccatgatgtcttcatcagagatgttttcgatgtattttgttaaggcgcgtagtgagttaccgtgagcggctacaatgatattttggccgtcgattaattttggagcgatttcgtcttcccagaatgggataacacgttccaaagtaaccttcaagttttcgccaccaggaattgcttttggatctaagtgtgcgtaacgacggtcgtttgctgctgaaccttcatcacttgcatccaatagtggaggaagtgtgtcgtatgaacgacgccagatgtgaacttgttcgtcgccccatttttcagctgcttcagctttgttttgaccttgtaatgcaccataatgacgttcgtttaagcgccatgatttcatttctggaacccataattgatctgaaccttcaagtgcatagtgtaatgtcttgatggcacgagtcaatactgatgtgtaagcttggtcaaaaaggatgccttcttttttcaataaagcaccagcgttttgagcttggcgtacgccttcttcgcttaagttaacatcaacccaaccagtgaattggtttgataagttccattcactttgtccgtgacgaataaaaactaatttagccatgtgtaagtaacctcactttttttatttttactctgttcattttacactgtttgctacacaatttacagtcttatcttttcagaaaataatgaaccttctttttttatgctcgatcagtcgttttcgtttctttcaataagaaaagcgccgccaagatggcaatcaccatgagcactagcgacgtcgttacaacagcgatcatccctttatcaaaagccgtgacaacaatttgttggacctttgcggcatacggtgtcttcactaattgttgcccccacgcgattgcatgtcctgaaaaagcacctgcttcaaccaatgcttgctgaatgccagttgctgccgccttcgggattgagctaccactaaagccagtcttcaaactcgtttcgtaggcattcgtttgtgataaaccgagaatcacaacaccgacggtaattccaatttggcggaaaacattcaataaaccggatgccattccgatttcttgaggattaatattatccatcgccgctgtattgatcattggattgataatcgcattgcctaacccagttagcgcaagcaatggtaagagttgcatataagtaaaatcagtcgttgtcacttgtctaaaaattaataaaccaagggcagaaacagtaaatccaaaagcaatcaaccattttttaccgaatttatagcctagaacacccgtgaatggtcctaaaacaagggaccataaactcattggcagttgatgcacaccggttgaaaaggctgagtaacccatgtaattttgcatcaaactcgtttgataagcggctaaggcaaaaatgccagcgcctaatgagaaagctaaaatcacaacacccacgaaatggcgattcgtaagtaacgtcaagttcatcattggtgcttttgctttcaattccacaaagacgaaaagcgctaaaattaaaacggaagcgactaaccaccccataatgcgcatatctgtccaagcccagtgcatatgttgttctttttgaatcaacccataaatcccggaaaataaactaattgctgacaagatcatccccataaaatcgattgattcgcccgcgccataagctggtgtttctttaacattgcgaatcactaagtaaactgaaataatcccgactggtaaattgacgaaaaagatggatggccagccgaagttttcgactaaaaagccccctactaagggtccaatagcagttgaaaaaccaatcacggagcctaaaatccccagtgcagtcccccgttcgcgcccttcaaagttcgacgccactagtgccatcgataaactcatcatacccgagccaccaatcgcttggaccgcgcgcccgatatctaataccaataaatttggtgccagtccattaacgacagaggccgctgtgaataaaatcatactcatgataaaaattttcttgcgcccgaacatgtcccctaatttggaaacaatcaacaagctgaccgcgtacatcaacgtataagcgttcaaaacccattgtaagttgctaaaagttgttttaaaatcaatcgccatacttggtaaagcgacattgacgacagttacgtctagcaatcccataaagacacccagactcatcgcgaccagcgctatccagcggttggttgtttttttcattttactatctccattttctctatctcatttatttgtgcttgtagccaatccattttggctttgatcgttgtgattacgaaatcggttgaacgaatctgccaataataataatccgtcattgtctcatccgcatcttttaattcagttagatgtttttccacaccgctataaacatgtaaatcttcagccaactcactgtagaaatcttgtaaaatgctgacttgttctgctgcatcaatgtagtgcatcccacgcatcttaaagcgataagcatcatcccacttcgcatcatgaacgactggtttagccattaattcagcaaaatagcgccgtccctcttcagtaatgtgcgcaatcttcgtaccacgtgaatcctgatcagcttcctcaaacccaatgcagcctttgctttccaatttatctaacaacggatacaaaaccccatttgaaattttccgtctgggcaccatcgcattttccaagataatccgcaacttatagcccgacatattccggctcattaaggcggataacatcagcaattcatacataaacgcataacctctctctttaatcagtcttttagacaggtctttaagacttattaagtatagttctttccgacatatttacaagcctttttttcatttttagacaaataaaaaaacatgatccgcataagttgcctgataacaaggcttcatgcggatcacgcttttatggatttagggatgtataggttgtacactctctctttcaactaattcaattgaaagtactttttgttgtggcgcaatagcaggctccacaatccggttcaataatagacgtgttgcttcttgcccaagctcgaaaatcggttgcttaatggtcgtcaattttggtgtgacatattcacaccaatcgatgttatcatagccaatcactgagatatcttctggcacctgtactcgtaattcacgtaacccacgaatcaatccgatagcgagttcatcattgattgcaaatacagcagttaccccgctatcaatcacctgtcgtgcaacttggtaaccacctaatttcgttaacggtgtcgttatttgccactcatccgccactggtaattgggctttcaacatcgcggcttgataaccaatgaatcgttgttcgatgttccaagctcgttgttctggtaaaacaattccgactttatgatggcctcgttcaatgagataccgtgcggccaactctccaccttgcgtatcggcaaccgtaatttcatctcccgcatgttgtttatctgattgatctaataagataaacgggatttgtcgtttttgcagatagctatccaacgttgttttttgtaaatgagggacagccaaaataaagccgtcaacatttcgacgaaccaattcctttaaataatgatcaactttctgattatgcgcccctgcactataaattaatgggatgaaatcgaattgataggcaatttcttcgacaccttgaataaactgactaaaaaaaggattattgatatccggcaccaataccgcgatcgtcttcgtttctttattaatcatattttgcgcgaaataatcaggttcatactgaagtctttcccgagcggctttgacccgcgcaatcgtttctgcgctaaagcgctcacctttattattaagaattaacgaaactgttgtgaccgatgtttgcgccagcgcggcaacatctttaatcgttacttttcgaaccattttggcactcccccgaatcaaattaataaaaacacccacagccggctagccatggacgctgttaatatgattataactgaatatccttttcataaggaatcgaattttgcgcccctttagtttggactgcaatcgaagaagccttattggcataagtcattgctgcttcaatgttactgtaatccaattcaagtttcgtacttaaagcaccgataaaggtatcaccagcagcggttgtatcgactgcttgaactttaaatgccggtacaaacccggttgttgttggtgttgcatagaatgagccctttgccccaaccgtaatgataacgactttaatccccatcttaaacatcgcttccacgttagctttcattgatgcttcgtcagtcactttaatccctgtgataatttcagcttccgtttcattagggacaatcatgtccgtcactgccaataattcagctggaatatttttaatcgctggtgcagggttcaaaatcgtttgaacgccgtttgaacgggcaattttgaaagcttcaataattgcaggaataggtacttcgaattgagcgacaattctgtcagcatctttgatggcttcttcggcttcatgaatatcatcgactgtcacatcttggttggccccaccatagattaaaatactattttgtccactagcatccaccatgatgtaagcttggccagtcccagctgtttcagaacaacgaacgtgatcaatgttcatgccatcttttttgaacgtatctagcatgaaatcagcggcgccttccttaccaaccttactaatgaaagctgtttgcgcacctgaccgaacagctgcgattgcttggtttgcacccttaccaccaccagcaactgcgcggccatccattgctaatgtttcacctggttgtggaaaacgctgaacgtttaaaattgtgtcgacatttgttgaccctaatacgattacttttttcatttgaaagccctcctaatggttaaaatacaacgccactttctaaaataatgttggaataaggtgtcatttcacccgtgcgaacaaatgctttggcctgccccaagtcctgtttcatttgtgcgtgatcaataaattcaatgggcgtctcaccaatcacttttttgatttgttcaagttgtgctggattagctgttttaatttcgtttgctaagtaaactttttgaatttccaattctgttagaacatttttaagtacttgaataaaacttggtacaccattttcgatggccacatcgattttttgcgttccagctgggaccggcatcccagcatcgccaatactcattgtatcaaaatgtcccatgtttgaaatcacatttgaaatttgtgaattgataacttgtgtttttcgcataataaatccgccccactttttatttgataaaggctgtcacagatccagccactaatacgagtactaaaccaattaatacggcaaccatttcttttttagtcttttgttctttcaacacataaatcccaccgattgtggcgaaaatgacactggtttgggataaaacaaaccccgttgctaagccattcacagaaggttgtgctgagataagatacgtcagcgctgcaaacgcgaagaagaacccactgaagatattcttatacgaagttgcttctttgaaaggttgataagtcttgctggtttgggttaatccgaagataacacctacaattgccattcctaatgcttgtggcaaaaagccttggaaaccgtccgcgtgtattgcttgtggaaaggcggagtaccctaggtagcctagttcgccaactaataataacaagatgccacgcaccgcgccatttttactagcgcttgaacgatcttcactccaggctgttaaataaacaccaaggataattagaataatcgctgtgaacccaatcaacttcgattgtgtacttgcccagttacccaagatgaagacgccccacaaagatgccccaacaagttggaacccagttgtgattggcatcgttctagaaacacccatggtttcaaaaacatgaaaggtgataatctgcgctaatgcccaacaagcccctgaaattaaacaaaaaataaatgttttggtttctggaatcggtgtcccgcggaaaatagccacaataatggccagaattaatgtcccaagtgtcgttccaataatttgactcgctggtttcccaccaattttaccaacgatcacagggaacaatccccaaccaatcatcggcattaatccaattaagatattgacagcattcatattcaatcctccgtcctttattctaggctagtaaaacgttttactaactatcatggtgattattataaaggagcttctttgagaattcaactcttttttgtaaccgctttattaaagaacacaaaaaagattaatctggcgcgcatttggcctgattaatctttttttaatttattttttcttgcttgtccgtatcctcgtttagatttataacctgcatctaaaatttgacacatttcaacataatgtcgttgctgtgtttcttcagctttagcgccgtaaacataacgtgcccattcgcgttgatagcctggtgttagtgcgtcgaaaaaggtttttgtggctggtgtatcttctaatcgagcactcaatcggggaatctcaacttcatattctgatagtggtttttgtggcatggtgcataactcccttattttaaccgcataacatctctggcaatcatcaactcttcattagttggcacaatcaggaccttaacgcgtgattgatcactgctgataatgcgttcttggctgcggacattatttttatcttcatccaattctacaccaaaacaagcgagttgttcacaaatggcagcccgtaattcactgccgttctcaccactaccggcagtaaagaccagcgtatctactccattcattaaagctacgtaagaaccgacatacttcacaactcgattgacaaaaatatcaagcgccaattgggattgtggtcgtgagtcagcggtttcttctaaatcacgcatatccggtgatagttcagaaatccctaataagccagacttatggttcaaaattgtgatcatctctggcattgtcttacctaatttttcagctaaaaaggctactaatgagacatcaatatcaccagatcgcgtgcccatcgtaatccccgcaagtggtgtgaaccccattgatgtatcgacagcgtgcccgtcttgaatcgcggtaattgatgcaccactgcccaagtgcaacgtgatcattttttgcgtttcaagcggctgatctagcatttcagccgctcgatgggcaacaaaccgatgactggtcccatgcgcaccgtatttacgggccccatacttttcataatacgcttgcggaatactgtataaatagttttcggcaggtaacgtactgtaaaatgacgtgtcaaaaacagccacttccggtacgcctggcaataatgcagtgaaaattttaatgtaataagcttgggttggattatgcaacggtgcatattcagccaaacgattaatctcattgagcccaaccggattaattactgcagagtccttgaaggcttctccaccagcaaccacccggtgaccaacccccgtaatctcatcgagatgggttacgatatttaattccttcaaccgcgttaataataacgttgctgcttgttcgtgcgtcgtaatatcttggacttgtttaaacttttcctgattgccatacttcactgtgaatacagaatcagataagcctaaccgatcaatcattcctttagcgattactcgttcagacggcatttcaaataattgccacttcagtgttgaactacctgcattaatagccagaattttttccatgatatcgactcccactctttcataatccgttcatggcttaattgtaagcaatttcataaaaagaaacaagccctattatatcagagtgcgtcatcaacgggtaacttctgagcatttatctaacttagcgaattggcgatgcaatcgccgatttgataagtgtagcaaagcacaggaagttattgatgaaagcacgtttaaggcaagaatgcatttggttgcggtcagcaactgagcattaatacaaactagcgcttaatctcgattttaagattaagtgctagtttagattaagcggaagttgttgcaaccaaaaagcacgttttatccataaaaaaagaaccgcccccacgcggttcttcctatttcataataactattctgcactttcttcgttcattttctttactttatttaggaatgaacggcccatcttgttatcttggtattcacttggttcaatgacatctaaatagaattgatcaatgaatcgaatcaaaccatcgactttatcacggcccatttgtgcttcgatttcacggtatttttcaacatagcggctcaccaaccggtctaaaacgtcttgaccttgtttagttaagctcaaaaatttaacccgttgatctgtttgaagatgttcttcaaccacgtacccattttctttcagtaaccgacattggcgtgaaattgctgaacgactaacactcatcgtcttagctaacttactacctgttaagttttcgttagttgaaatttcgtacataattaaaaattggtcaaaagaaactttgtaatttaaactttctccactgacaaagtcgcttaaattgctgacaatccaccgataaatcaatgaaagatgcgttactacttcccaatcatcagaatacttgcttgttgcttttgctgtcataaccttttctccctttactaaccgatctgtcatgcgtagaaacaattaacggatttaatttattttgctatcaatatattagcatattttgagagaaaagaaaccactcgattcattaaatagctataaatagatttgatgtgcaacaattcaattgaccatataatcatcaacccactatattagtttgtcgtgactatataaaaagaagtcattaaagataaaattattttcatccttaataacttcttttaataacatcttataggttacgatccatattgaacgtcaatttcgataaattaatgcccgacataacgagttccccaatcatcgaggtcgcttcagtcgccatctgcttaacaatcgcatggttttgctcagtcaaatactccgttaaggcagcgccttgatacttttgtgcttccacttgaatggcttcaatcatcgttcgcaattcttgcttacaacggtttaagtaatctacattgccttgaatgtgctggctataatggccttccaccaatactgaaattgtccggtataaccaatatgcactcttcatatcccatttcattggtgtttcgctgaaacttagatccgtatcgttcgcattcgtgaaaaatggaatgaacggtgtatacgttggcatccccattgtgatccacatgatggccgcttgttcctttggcacatcattccgtaattgtaaaatatgtgcattttgcgtccgattcaaaccgattgggcggtaacgatacttgtcggcatcagtcccatgccccattggatcgaatggcgtttcattataatgtgagcctaacaacatttcaatatcttcaacactaattttatgttcaatacgccgaataaatggtaattcagccgattcgggtgacatatcaaaatcagcatcaaataaatgatgggcgtaccaaacccgtggtgtattatagtgccggtctttttcattcatcgtgccaaaaatgtggcggaaattccagcccgttttatccggattcaaatgatgggcttcaacgtattcttgaatgccttctgcccacataaaattgtcggcatccgtgaaatcaacttgttgaatcgccacttggttggcggcaactgcataagcatcatctggaatccgttgtgctagccataaatgccctgtcacaatttccatataccacacttcattgtgatcactaaagagcacactattgccggcgggtgagccgtattgtttaatcaaattaccgagatagctgaccccttcgcgcgccgagttaatgtacggcgcaaccatagcttgcatgcaatcttcatccaacccgtctttcaccaatggatcataagcgagggctttttcatttccatatgtactttcggtacagctcatcgccacgttaacttcgttaatactactttcatcataataaccattatgtttgtaatcaacattcggaacagcgggccatcggtagccattctcaggtaattcggcttcaaacccgtttaaccaagatttaattttagcacccttacgccctttaacagctggattgatgtgaaaccgttgtggtgttaaaggtaaaaaagtatcgtcgttacgcgcaatcatcgttgatccgtccaatgatgcgtttttaccaactaaaattgatgtacatgctgattccataagttgcactccctctgatgaccactttaattgaactcatcggtcacgtttgattaaaattttctcataattaatatccatagtgtacgcttctcacttgcgaaagtatagcctgattttttgattaatttcctttaacccccgcatttattgcgatttctatacaatattggatttcacgttaatttccgatttcggaattatcgtcaaacgaccatgttagcgctcctaatttcatgatatattattagatgaataactaacaacaaggtggtttctcaatgaaaaaattaacacttgctctgttgctgaccatgaccagctgtttcatgattctagctggctgtcagaataaaacagaaattccagctgccgcaactaaaacagaagaaaaaattgatcaatacgtccaaaaagtgaaccaactctatagtgatggttcccgtaaagatcctgcgaagttaacagccaataaacaacaccaaattatcactgcggctgacaaactcgacaaacaaatcacgcccaacctttatatgagcggaattagcgctgatgcaaaggctgattacaaggctgcccaaaaagatctagataagattactggtaagcaaccagcaactagtgaatctgaaagtgttgcttctgaaaagcctgctaaaaagaagaaaaagaacaaagttaaaacaagcgcctttttcgataaagatgggattgtcaaagccgatgcacaacttggtgaagaaacggactataccgaccaccccaaacaacttgctgattatcaagaagctaaaaatcaattagcggctatggcagctgtccggaacttatttacagacgacaacctcaagcatattccagctaacctatctgctagcgacttcccttacgtccgagctttgattaataaatcaacccatgacggctttaaagaaaagtacttggcgtatgttaagaacgctgaaaatcaatacaacacttactctaacaatacccaagcggcaaccacgcaaaacacaacaaccgctaatcaagcaacaactaaccaaaacacagctaccaatacacaaactacgacaggctatgctgctaacacggcaacggggaatggcactggtgcaacaactggaactgggacggggacttcgacaacggataccacaaccggaaccgggacgactggtacacaaagtaatactcagaccggtacagatcagacacaaaccggtacactccaataatcttaagacacttcctaaaaagtacgctatcttcttgatatgcgtacttttttgacgttcgcttacgtttagtcttttaatcgccgatatcttaagaaacatgtaacagcgcgctaactattatgtaacatgtttgttactttcagatgctatgctaatcagcgtactaaattaattcaaaattcaaacaacttaaaaaatttttcgaaggagcacaacaaacgcatgaaaaaacaaaaaatgacttacttatcttctggaatggttggccttgccggcttagtattgatgggtcttcaaacaaatgatgcccaagctgcaacaaatggtacggttaactacgctgacggggcaacaaccgtttggactagcccagcagtaggtcaaaaacctgctcgttacttggcaactaaccaacaagtaacaatccaagacacaaaacaagtttacggccaaacatggtacaaacttggtaatgacgaatgggtttcaagccaattcattacagccggcgatgcaactgctcaaccagctgcaacaacaaccgctgttaagaacacagtaacagctaacttccaatcaggtgcaacaactgtttgggctgacacaactgctgctcaaccaactggcgaatacttaacatatggcacaactaaaaacgtcattgatcaaaaagatttaaacggcacaacttggtaccaattagaaagcaaaggttggattcctgctagctacgttgttttaaacaaccctaacttggatggtgtcacaccaattacaaatgcacctgcagtgacaccagttgctgcaacaaccactacaactgaagttcaagcaccaactgctcctcaagcaacaacgccggcacctgctacagaaacaccagcgcctgctgcaacaactgaagcaacaacccctgttgctacaacaagtacaccagcagcaacaacacaacctgctcaaacacaaacaacgacaactcaaagcagccaacaaacaattcaagctacaacaactcaacaagcaccacaaacgaatacaacgacaaaagcaagtggtaacgcacaaactgttatcaacgctgctttatcacaaatcggtaccccttatgtatggggtggcacaacacctggtgttggtcttgactgttctggtttagtgcaatatgcatacgcacaagctggcgtttcattgaaacgtgttacaactgctcaagaaggtgctggtcaacgcgtctcacttgataacttacaacctggcgatatcctcttctggggtggcgctggcgcttcatatcacgacgcaatctacatcggtggtggccaatacgtccacgcaccacaacctggcgaatcagttaagacagcaagtatctcaagctacttcatgccttcattcgcagttcgcgtcctttaatcaaaaatatgtatttaaaaagagccacatcttaggatgtggctctttttttgtggttaaacttagtttgaaatatatttattttccatattaaaagaccatccaaaggctgcttttcaagcgacttttagatggtcttttaacattattttgaaaaaattcattataattatttagctgatttacgttccttcaagaagttcaatacagcagctgtttcagcgttacgttttttagcattgttttggttaacaggacgacggttaccagaaacactaacatgtaagttttgtgacattgcgcgtttcctcctttcgtgcatatattctattattctaatctgaattgacttatttttcaagttaactttattcgtcttttggttttctgaaatagtttaggagccaactggtcagcggaacggttgctatgaccccaatcactccgattaatagtgcgagtccctcaccaattaaaattttatggttcacaattttactaattggataaccgagttgaatgaaccacatcgttaatgacaagaagctaccgaaaaaactaaagaacagtgtgttaaaagccgtcgcaataattttttcaccgatcgcaatccccgctttaaagagttgcttggggcccatttgtgcgtcgtattctaagatttcgactaaaccactggcaactgcaatactggtctcggcgattgcccctaagctgcccagaatgatcatcatgatactaattttttggaacgacaagccgattgcgagtccaaagccttcaatctcttctgcatcttccgcaccaaagccgtaggtagctgctaactggctgaggggcacaatattgatcagcaagcccaccaccacgattaacgacgtcacaaacgccgtcttggccgttaatggctgcttggtattcatgaagatggatgtcgctaacaaaatcagactcaacagaccactcacaatcagcggttcaaacccacccgccaccaagacgagcgctaatataatcacgacaaaattcaacccgaggctgaagaaaatcgtcaacccttgccagccacagactagcactaataagatcagtaaaattcccgttagcaacatcataggcgtctcacccgcactaaccggctggccaacaagctcgttactggcaccgccaaagtaatcccaatcgcactaatcaccgtctgcgtaaaacttaacgtgacagttcgcgataaggtatacgcaattgtgttgccattgcgtagatacaataaaataattggaaaagcatccgccatgactaaaaagaacaacacattaactaacggaccaataatttcgcgaccaattgtgagtcctgatttaaacaattcagtcttcgtaacgtttggccgttcaatcgctaattgctggagtgacgatgaaatatcggtcgtctcatccatcacagcgcctaaaatcccgagcacgacttccgctaagaagaccgttttatacggctgtaattcataggccatcgtttcataatgcaagccttgatcgccggttaatttcaagacggccatgctgagaaacagtgctaggaacgttgcgccaattgtcgcgccatatgagacaagcatctggcggttgggtcctaatactaaaagtagcgttaaacccgttagaacgaccgctaagccacacataatcggcaataaccaccgtccacccgtcatcgcgtttaaatggagtgttaagacgaatgcgacgagattgaccaagacactgattagcgtcatcaatccgcgcttgagcatcattagtaataggaaactaaacgtcaacagtgttaagccaacgatgattgtatcgcgcttaggctcgtttaaggtccactttttcaaatattgatcacggtgtaaaaagacttgttgtcctttatagtaccgcgtcgacatcgcttgcgacgccgtatacgtattgcgcagcgtaatcacttgccctttttgcttagtgttcaaaaattggcccgtgacccgctggactacttctgtatcttcattttggtacgcatcagtctgttcctcacggctaattgtctggacccgcgttacccgaataatcggttgctgatacaaaccagcatcgaaatacgtccctaatacaccgaggacgcagatgacacttcctattagaccaatccacagccgtttatgttttaccacagtcgtcacctctgttttattctagcgtttctgcgggtgaacgtcagctttttgaggctgatttaatcattatttaagcgactattgaaaatcccatacgtaaagtagaccactaagccgatgacaaaccagattgccgctgcaatccaagtgacttttggcaattcaaacatcatcaataaacatagcgctcctgatattaacggtaaaactgggtaaaatgggactttaaacccatttttattcggaatgtccttgcgcttccgcaatgggatgaccccaatcgacatccagaaaaaagccaccaatgtgccgatgtttaccaaattagtcaattgatccagtgaaacgaacccgcctagaatcatgatgactaccgtcacaattttgatactgttagttggggtttgatgttttgcagtcactttaccaagtgcttttggtaataagccatcacgaccaattgaatagatgaggcgggaactgctgtaagtcatcgtcaacatcatcgtgaacatccctgctaatgcgccgagtgaaatcagaccggcaaaccaattttgatggacgacttgtagcgcgaatgtgaccggattagcaacgtccaattcgcggtacgacaccatccctgtgaggacaaacgccactaatatataaagcaacgtacagatgattaacgtcccaataatcccgataggaagatttttttgtggattcttaacctctgccgccgatgctgacacacagtcaaagccaaggtaagcaaagaagacgagtgatgcccctttgaaaatcccacttaccccaaacggcatgaacggttgccagttagcgggtttcacgtagaaaatcccgacactaatgaaaagtagcactacgcctaatttaatcaaaaccatgatgttattaattcgtgttgatgaacgagtccctcgcattaataatgtcgcaatcaagcccactaccagcatcgcaaacaggttcacataagtgccatgtgccggatcaaacgggccagtaattgcatgcggaatatggatgccaaacccttcgataaatgatacaaaataagccgaccaaccagttgaaactgccgcaactgacaacatatactccaagaataaagcccagccaagcagccaaccgattaactcaccaaaaataatattgccatatgagtaagcacttcccgcaactggtaatgccgatgaaaattcggcgtaacacatcgccgcaacggcacaaacgaccgccgcaatcataaatgaaatcgtgattgccgggccactatgtaacgccgcaatcgttcccggtaagataaaaatcccggtcccaatcactgcccccacgcccaatgcaattaaatccttagccgttaatgttttggccaaccgttgatcttgttgtaaataacgttccagtgattcttttcgtaacatctttgccattaatcccattttaaccactcctatttttattgtatgcactcgactaggcgattactcgccgcctaccaggcttcgtcgcacttctttaacgtgctccttgaactgccttctgcgcttaactacagaatcacaatggcggtcgtacgcccaccattgcgctttttaggttatgctcgaagccaaatcgttcaagtcgcacttctttcttaacgtgctcctcagccagatacttccgtatagctacgtccagtaaacaaagctacaacccagctttattcactggactatgctattactcagtatctaaccaggcttcgtcgcactcatttaataacaaaaaaaggagcccactagtcttcactagtgagctccaccaggaagatgactcggggttacccagccatcttccaattcattaaggtttgtcatttcaactcaaatgccttctccttaatcaaccagtcgattactgggtatcttaaagaaaaagctaaaggcaacacgttgcattgaattcatgacagaccctccttgttattaattagttacttagtataggggataaccatttatttgtaaaggattattttaaaagttgttttctaaaaataatctgctagaatcaaatttaacttattcaatggatgtgactggcattgaaaatcgcatgctatttttctgacaactcgattggtacgaactgttcatgcacgtgcgtggaccgtttatttccgattgccgttagagattgcttgcgttaattttcaggtcagttacctaaagacttgttaaaagacgctgttattgcgtctttttttgtgcatttttaacgacaactgggccaatctcattcaatcaatgaggtgataattcatgggcacaattcaattcaaagcactcacatttaactattcagatcaaacacaaccgttgttcgatcacgtcacgcttcaattcgacgccagttggaaactcggtttaatcgggcgcaatggtcgcggtaaaacaacgttattaaaattacttcaacaccaactaccatttgatggccagttggttaccaatctcgattttcaatatttcccacagactgttacagaacctacgcaactcacacgcgatattctaatgcagctaggtaacctcgacaattcaaccttctggcaagtcgagcgggaactgcggctcctacaagtcgcacccgaaatcgtctggcaaccatttgcttcgttaagtcctggtgaacaaaccaaaatgttactcgccttactattcatcgacgactatcattttcaactgatcgacgaaccaaccaatcacctggatcaagaaggccgccaagtcgttgccaattatttacgccaaaaagccggcttcattgtcgtcagccatgaccgccatttcttaaaccaagtgatcgaccatatcctagcgattaatcgtgccgacatcaccgttcaccaaggcaactaccaaacttggcaaaccgcccacgaccaacaagctgcttatgagcaacaacagaatcaacaactcaagggcgatatcaaacggctgacaaaaacagcacaacaaaaagcgcagtggtcccacgaagctgaaaaagggaaaaacgccgccagtgtcaaaactgaaagtgccaatctcgataaaggcttcatcggtcatcgcgctgctaaggttatgaaacgggcgacgacaattgccaaccgcgcggaagaagcaatcgaagcaaaacaacaactttttaaaaacgttgaaattgctgcaccactgaccatcaatcagcgacccctcaaacccggtcaaaatgtgcttagtgttgatgaacttgtcttacaacaagacggcgtcatccttaatcaaccactctcattcaccttagaagctggtcaacaggtcaccctaactgggattaatggcgcaggtaaatcaacactgattaaggcgttacttgcattacccgcaactgaccacattgccagcggtagtctgcaccttaatccgcacttaaccctctcgtatcttccacaagatttcgatcaactgagcggctcactggccgacttcgctgctgcgaaacaggttgatcatgaacaactgctaagcacgttacgcaaactaggctttgaccgcgatttatttacccaccgtctagaaatgatgagcatggggcaaaaacgcaaagctgcactggcgcgttcgctctgtgaagaggccgactgttacctctgggatgaaccgttgaattacctcgacgtcatcacgcgtgaacaaattcaagccctaattgccgagcaacgcccaaccctcctattcatcgagcatgatgttgacttcgttaacgccatcgccacccaaacctacgcacttcaaccacaacactaatccgtattatttgtataccgtgtcacgttgtacccgcgcacgttgaagtaagtcgttggcgactcatcatcaaaaaaggccgggttcatatcattaagtcgcgtttcggtattggttaacgtttgttccggcagtgctaaattttcacggagccgattcgaagcagcctgcaaatcttctgtactaatgatttgataggtactgccgttaagccacgccgttttacctagcaattggctgctgacaatttcaccactactttgatgatagttgcgaatcaactgcttcacttggtcggctgtaaaatcagtgctaattttctgaccaagcttagtcattaagtcaccaatgttcatcaaatattttggcttttgaattttttgcgcaacttgtttcaaaacttcttgttgccgcaattgccgcccatagtccccgcgcggatcttgataacgcatccgactataagcaagcgcctgatcaccattgagatgatggtggccttgtggaatcacttgtccattcaaattaacgtcaatcaccgtatcgatggtaatccccccgacaaaatcaaccaattctttgagtgcgcccatatcgaccgtcaccgagtagtcaatcgggagccctaaaaactgactgactgtttttttcgccatcttagccttaccaatttcataagccgcattaattttctgaatattaccgccgtggtcatctgccatctctgccaatgaatcacgcggaatagagtagaccaccgttgcttcttacaccgggttaagtgttacaaccatcatcgaatccgacagaccacgatcaacgcgcccatccgcgcctgtgtcaacgcctaataataggaacgagattggctttcgctgatcaatttgttttgaaattcgactagacccggttttaatcgcatcaacagctttatcctcttgatgcaaataaaaacctagcgccgccagactaatcacaacaatactactgattacaatcacgatactgatctttttcacagtcaattcccctttgtttaaacgcccaccgcatccttttttagatatgaaccaataaatgctgtcccccttttgaatcgttcgattctggcggacagcattttattttaacctttgctttaaccgacgtaagccaactagcatgaccggcgctaagtgcgaccgattaagccatcgtagccaccgggatgtgccggttggtaaaccacgttctaaattgatcaattgcgtctgaatgaattgtcgctcaggaacagtcagtgtgcgctgatcaaaaacaattaacattctaaaaaaggtccgcacatactgctttaaaaatcgtgtgtaagctgcgcgatccacttctgcaattccagccactaattgcgtctcaatgatgtgcagagctgttaagttaactgagaaccactgcggctttagggtactcgtagccgcctcagcatgccctatctcgtaaacatataaaaacgctgcccgatgcctaacaactcggcaatgttgtaaatactgcaagttgaaaattaaatcctcaccgatacgcagcgattcatcgaaccgcaatgcttcagcttcaataatcgctcttcgatacaatttattacatgattgaaagaagacattttgataatagtagtctaaaaaagcccttttgccgtcttgtattgatagtcaccatcttcagtcaaaccaaaagcagaatccgttccgccggctctttcgattttagttctgaatagcacccaatctaccgactgaccgacgactggttcaaataattgggcactgttaaccaagaagtcatcggcattctcagcatcaagttaagcccataaactaatcagtcataaaaaggctgcatcaaaattacttttgatgcagcctctggttcaagcatagactaactacgctttgtttgttattaatctaatttccgttccaactcactaacgatttcagcatgttttgcttccgttaatttaatcttagccatgaagattaacgctgaaataaccaataacgccattggaatgaagaacatgtacattttgaattgcaacaaccccgcgttagtgatatcgcttggtttcgcattcccagtcatgccagcatgaatcgcagccgtcacaacgacgccgtttgcaaaagccccggctagtttatccaataaaggtcgcactgccaatgttacagattcattccgtgtaccacttttcaattgtccgtattcaacactatcggtaatcgtcatcaaagcagccaaaaagaccagtggatatgggaagaagaataagccgaccgcaattaagactacgaccaagttacttccagcaaacaagaagaggatataaccaagcatcatcattgcgattccgccaatatagattgcccggcgatgaattaaagcaaccaatgttgggaacaacgcaactgacacaatccctaagatggcagtaatcacaccaaccgttgagaacgctgcggcgcggcccatgacatatctaaaataatataaaagcagtgagttcgtaatcacataactaaaggcaaataagaaatatgaaagagataaccacattaattggtcatttttaccaatcacactgaaaacgtcacgtaaccgaaccttttcagtattttcccgaatagcactcttttcttctttggttcctaagatggtcgctaaagcgcctaagaatgaaacaaggccaatgacaacggcaaaaccgaaccacccggcactggtttgttcactcccatgactcccagaaaatagttgcgagaagaaaaccaccattggcacaatcacgataatgaccccttgtgcacctaaagtggatccgaaacgcgcaatcgccccaaattttgtccgcttttcagaatcaacactcagcgctggcaacattgaccagaacgagatgtctttaaacgagtagaagatatctaaaatgacgaaaacgattgcaaaaagaactaagtaaagataagggctacttgtcgcaagccctccaaagttggtaaaaatcatggccaagccaacagagctaataattgaccccgccagtaaccacggcttaaatttcccccaacgcgtccgtgtattatcaaccactccaccaatcagcggatcgaaggcaatttcaacaatccgaatgaccatcattgtataagtgacatacgcaatcatttttgaattaaagcctgcatttttggtatcgaataattgactcgtgacgaacatcataaaataagtgctaagtgttgcataaaaggcgtcatgcccaaaggccccaaaagcgtaagaactatactgtttaacatcttttagttttttcatttctttagattcctttcgatagtttcttcattgtaaacatgctttcatcaagcacaaccctcgggttatcccgtttgatgacgcactctagtgatagcgatgttcgataattttttccaaaatcgcttggcgttgcttttctttggctgagccgaattggttttcttccaatgaattaaaatcgttggcgagtaaaactgattctagatataacgtcaattgacgcttgatataaaccttattgtcttcattcgtttgcttgggattcccagcgataattgctgcagcaaattggtctggatcgataataattttgttgtcgttcatcctagtcgcttctttctcttttagttagtaaacgtttactatctacaccatacaaataaatcaatctgtacaagaactatcctgtaaacgcattcttttagattgcaatcttattttactaaacttttagtaaaatgtaaacggttatttggaaaccgttacattcatcactggttacagttatgaatttaatttcactaaatatttatttttttattttttattgaaatttaatttcattagcgctatactacatctatagaaaacgctttaaaaagaaaggagttgctttatgtttggtttttctatctatcttaatcaaccgttcacctcagcaagccgcatgaaccttcaaaaaatgcacgccgctggcttcacagaagtcttcacgtcgatgcatattcctgaagatgacatttcacaatacactgctagaatcaaagcactcagcactgcgtgtcgcgaagaacacttacaattgatgattgatattgaaacaagttcattaccagcagttggtctctcacttaacgatcccgccgcaatactgtcctttgggattactggtttgcgaattgatttcggcatcgataattcaaccattgctaagttatcacaatatttgaagattgccctcaacgcaagcacaattgccgaacaagatttagccgttttacgcgcagctggtgccaacttcgctaacatagaagcttggcataattattaccctagaaatgaaaccggtttagaacgaacctggtttactgaaaaaaatcagtggcttaaaacgcaaggtttaaccattcaagcttttgttcctggtgatggcattttacgcggaccacttgaagaaggattacccactttggaagcccatcgttatcagcatccgcttgctagtgcgctcgatttattcaactgtgaaacagataaggtcttcatcggtgatccaactttagcaaaaaccactctagcgcaatttgatgcattctaccatcaacacgtcataaccttgtacatgcttaagtcagccccctgccccccttatctttttaaccaacatttccataatcggcgcgatgtcgcccgtgatgtcatcagattagaagaaggccggccactttgtcagaccacaatccaacctgaacagacatcagtacgattacgtggcagcatcaccctcgataaccaagactatggacgttatatgggcgagttacagattaccaaacatgacctacccgcagattctcgtgttaacgttcttggaaaagtcatccaaaaagatcacgcattactgccattcattcaggctggacaagccatccaactaaaggagattgattaatatggatttaagtcatttaacaaccgaaaaccgtaatcaaaagacaatgcaattggacgaactttcaattgaaaaagtactcacactaatgaacgaagaagatcacaatgtgccagaaagtgttaaacaagcactccccaatattgaagctgctgttcaagttatcattcaaagtttccaaaatgagggacgcttaatttatatgggcgctggaacaagcggtcgtcttggtgttctcgatgccgccgaatgtgtccctacttttggaacagaaccggaactggtccaaggtttaatcgccggtggtatgcaagcaatgaccgttgccgttgaaggggcagaagattcaccgacattaggtcgcgaagacttggaagcaatccacttaaccgctaacgatacagtagttggtattgcggctagcggccggaccccatatgtcatcggcggtcttgattatgccaaccaaattggtgccagtactgtcagcttagcttgcaacttcgatgccctcatcagccaacatgccacaattaatatagaagtcgaagttggtcctgaaattttaaccggttcgacccggctcaaatcaggtactgctcaaaaattggtgcttaatatgttatcaactgcttcgatgattggaattggtaaagtctacaaaaacttaatggtcgacgtgaaaccaaccaacgaaaaattagttgaacgtgccaaacgaatcatcatggctgcaactgattgtacttacgatgttgcggcaacccaatttagcgccgccaacgaagacgttaaactcgcaattgttatgattttaacggatttatcggctaatgaagccaaagaacgtttaacacaagcacacggttttgtacgtcaaactattcaataacaaaccttaaggaggcactattatgactgaaaaaaaagaagtacgcttagccagagaaatttacgccgctgttggcggacccgcaaacgtcgctaaattaattcactgtatgacacgtgtgcggatgacaattcgtgacgatgatcaagttgatatgactgcgttaaaagcaatcgatggcgttttaggggttgtcgaagaagacacgcttcaagtcgtcgttggtcctgggattgtcaataaagtcgcccaaatcatggtcgaccaagtcggtgttaaacttggtgaacccttcccagaaaatctcaccacaactgccacagccgcaacaatgaccgaccgcgaaaaagtcgaagcaaaagccgctgaagttaaggcaaaacaaaaagcaaaacaaaagagtacgccaaccaagcgggtcttaaagtcgatttcaaatattttcgttcctttaattccggttttcgtcggcgctggtttaatcgggggaattgccgccgttctatcaaacatgatggtcgctggatcccttggttcaaactggtctgaattcattaccatcttaaacgtcatcaaaaacggcgtcttcgcttatctcgcaatctatgttgggattaacagtgccacagaatttggtgcaactcctggtttaggtggtgtcattggtgctgttacacttctaagtggtgttgatcctaagttgccattacacaatatcttcaatggcgatcctttatctgcaggccaaggtgggattatcggtgtcatcttcgcagtttggattctctcattggttgaaaagaaattgcatcaatttattccagattcaattgatattattgtcacccctacaatttcattattattaattggggtcttcacaattttcatcgttatgccggtagccggtgtgatttcaaattcacttgtcggctcaattaattggattctgaatgtcgggggtgccttctctggtttcgcgctcggtgtactcttcttaccaatggtaatgttcgggctccatcaagtcctcacaccaatccatatcgaaatgatcaacaaaacaggttcaactttacttttacccatcttagcaatggctggtgctggccaagttggggccgcacttgccctttggattcgttgtcgtaagaataaagaactcacaaatatgattaaaggggcgcttcctgttggcttcctcggcattggcgaaccgttaatttacggtgttactttaccattagggaaaccattcatcactgcctgtatcggtggtgggattggcggtgccgtcattggtgcaatgggcggcgttggtgcgattgccatcggacctagtggcttagccttaattcctttaattacaaacggccatcaattcgcttatatcttaggcttgctcgcagcttatgccggtggctttgtcgcaacttatttctttggcattcccaaagatgctacaatggaaaaataacctttaaaggacgctgattttatggaaagcatacttttttcaattcaaaagaaactcccaactttaaccaaaacagaacagcggcttgctcaatacgtacttgcccatccagtacaagtaccgacaatgacaactagtgcgtttgcaaaagcggctaacgttagtgcagcgactgtcgctcgctttggtaaaacactctgtggtcaaggtggctttccagcactcaaattacgactttcatctgaagggaataccgatcaacggctcttcgatgaaattaatccgaccgatacaacaactgacttaaaaaataaactaacttttcgaattaaccaagcgattactgaaaccaatcatcggctcaagaatgacgcgctcgaagaatccgcaatgattctccactcgaaacaaaccattttcatttatgggcttggtgcttcaaacgttgccgctgaggatttacaacaaaaactactgcgcgttggtaaatctgtcattcaatcacttgatacgcatctactggcagcagcactaaccacacagaaaacacaggcagcacttatcttaatttctaactctggcgaaaaacaagagcctctgcaacttgctaaaattgcacaacaacttaatattccaattattgttttaactcataataatcaaagtcaaatcgcacagttagcaaccatcacgttacagcatgatgatagtactgaaaacagtcagctaagaagcgcggcaacgacttcattaattgcacagctttacgctgtcgacctactctattacagtttcttagaacaagatttcaccgctaatacgaaccaattagctgattcatcgaacgttatcagcgaatattttactaagtagaaggagtcatcattatgaaactattctcacgtaaacccaaagaactcgaattacacgctattgtagatggacccgtcatcccgctcaaacaagtaaccgacgccgttttttcaacaaaaatgatgggtgatggttttgcagtaaaccctagtgatagtcatatctactcaccagtggacggtattatctctagtgttttcccaacaaaacacgcgcttgggattacaaccaaaacgggcgttgaattattactccaccttggcttggataccgttgaattaaacggtgcgccgttcaccattcacgttcaagaaggcgatccggtgacaacagaccagttattagttgaaatcgacttagctgcgcttgcttctgcgggtaaagaagcaaccagtatggtgattgtaaccaacatagacgatatcagcggtgttaatgcccccctaacaactagcggacaccacggtgaggttgcacaaatcattaacttataaaaataatatagaaaagccccgctcagatgagcggggcttttctatattatttggctaagactgttatttgattattataacatgcttgattatcaaactgcatcaatactttagtcgctagatcttgcgttgcaaaaactaatctttcaactggcgtatttgccacgttgtaagccatcatgtgtgaaaaataaacaaactgtaacatattactgtatgccgaaacatcgccttgtttcacaatttttttaacgaaaaaattaacgatatgatcgccaaaacgaacataacctggaatcgaaatcagttgtacgttggactgtttagcagcctacacacgattggccgcattatctggcgcgtaaatgaccgttgtccctgtcgtttggtctgttggttgcattgtaattaaagctgtttttgacattaatagatactcctcttaagtgatgataaggtccattgtaccagagattaccgtttattttagtaattctagaaaacggttctgccaaacgttttcgtaaaaggcaattgtctgttcagccgtcatataggcgttgtccgttgtagttgaaagaccagctaccatttggagttggtagcccaaatggtgggcaactttaatcgttgtatcgacgcagtatttggtctgggcaccacaaatttcaagcgatttgatttgcatttggctcaataacgtttgtaagtttgtctgccaaaatgaatccgcatgcgttttttgaacaaagattgccgttttaggcacattcaattctggcattatctaccaagtcgactgaccagcaatcaaagtcttatcgttatgttggacaaaaataatcgggcgactttccgcctgataggcatcaattctggcattaacgcctttaattaattgattaagacgcgcaacaggctgctcacttttgcagacaccattttggagatcaatcactaataaacaatcggctaacttcagcattagtcccctctttcctttaaatcaaatcgagtatatcattatttaactaaacctcatattttgtctgacgatattaaaaagaagagatgcggattacccccacctcttctttttcaatgtctccgatgtttttcccgcttcttaatctggtgttgctgaaaacggctgtattgtatggccttcttttcggcatgttgttcagccctattagttgcatgttgtgctttacgttgactactcatccgaatctttttgttgataccaacgaattgaataccaatgataactgacttggcaccctcaaccacttgcatttaaacaattccttcacatgattatcgctcaatcccccactttcccgccaaaagcgttatactatggataataaataaaaggagtgttttgacatgcaaaaaccaattaaagggtcatgtaccacggtcttagtcggcaaaaaagcttccatcgacggttcaaccatgatttctagaaatgatgatggccacgaagctttggatccacaacgctttgttgtggtcaatcctgaagaccaaccccgagattatcaagcggtgattagcggcgttcaaatccaattgcctgataacccaatgcgctatacctcaattcctaactcattattgacgaacgggatttggccagctgctgggattaacagtgaaaacatcacgatgtctgccacagaaacgattaccactaacccccggattcaagggcttgatccttttgtccctggtggcatcggtgaagaagatattgtgacattagtcttgccttacatccacagtgctcaagaaggggtcgaacgtttaggcgccctccttgaagaattcggcacatacgaaccaaacgggattgccttttctgacaaagacagtgtttggtggcttgaaacaatcggtggtcatcactgggctgctgttcgcatccctgatgatgcatacgtggttgcccctaaccggatgaacatcgatcatttcgactttgattcagccgacacgctttgctcagctgatttaaaaacattaattgatgacaaccacttaaatcctgactttgaaggctacaatctccgtcatattttcggcagtgcttcaatcaaagatacggtttataacaacccacggacatggtacggtcaacaatacttcaatcctgaaatcaaacaagatccaatggaccaagatttaccattcatctgccatgccaaccgcaagatttcaatcgaagacgtcaagttcgtcttgagcgctcactttgaaaatacagaatacgatccttacggtagcgcccctgaagatgttaaaactcgtttccggccaatcggaattaaccggaatcacaacgtgcatattttacaagtgcgcaacaacgtgcctgctgaaattgccggtattcaatggttagcttatggtgccaatacatttaacaccgtcgtgccattctacacgaatatcaacgacacaccagaatcatacaagaatgccacaggtatttttgacttgaacaacatgtactggttaagctgtacaaccgccttacttggcgatacagattacgacttctacgttgatatgcgtaacaccttcgaactcgaagcaatgagtgcctatcacgtgatccaaaacgaaaccgacaaggccttcactgatcaaaaagacgctgcagccttcttggaagccgctaataacaaattagccagcgaatcacttaaacgccaaacagccctacttggccaaatggtgatttcaggctcagaacacatgaaattacgctataacttgaacgactaataattatttaattcaaaaaagagcgtctcagctattcgttagttgaaacgctcttttttgagttgtcctcttttttcagtagcgtataataaatactattactcaaaccacactaaggagtcatttatcttttgaaaccccaaaaattaaaactatcggattacttactcggctttggattcgtattattgatggtgggcattgccactgtcttgaacgatgttgagattattctacccgaaatcgcagccttaacaacggggctgtggatttatcacgaaccgggttggctcaatcaacccgccaagatattttggctgccatcgataaccgccatcgttgggtttggcattaatcggttgccgctcagttatgcagttaaaattagcttactactactcatcatgattgttttactttgtttatttcgctcaacactcgcaccatcgtttgcaacggggctgttaccgattatcgtcaacgccactgaactttcattcatcattgcaattttaggctttacgctcactttgatgttggtcgttagcctccgcaaattgcatctgcaacatccctatcatgccacgattaactatcgcgtcatgctggtttttctaatcattgcactcttatgggtgttagttgttagtttactcggccggccacagatggctgccattccgccggtacttgtcgtcttttttgaaattctacaaaaaccaatgtatccaggtaaaatggccatcaagcagatggttgcattaactggcgccgccacaatcggattcgtcgcttatagcttacttgattcacggttattggtaaccttaattgcactgccactagtttgggcattactctatctgctacaagtcagaattcccgccgcctacgccttccctttattggccattattctcccacaccaaatgtttcaaagtttgccgctcgtcactttactggcaactagttacttttttggggctgcttatttataccagcaatacattaagccgcgtctcatcagcagataacatgacggtttacgactaattttattagttgtaaaccgttttttagtggctttttgcacaagcaataatattgcagtttcgctgagaaataatatagttgagttgaccctgtcttatctctctgggcacaaagtgcaatgaaagaggctatttacatgacaaacaaactaacgactaatgagggccaaacgtgggcggataatcaacattcgcaaactgctggtcaacgcggtcccgttttaattcaggattattaattgctcgaaaaactcgcgcattttaatcgtgaacggattccagaacgggtcgtgcatgctaaaggcgccggtgctaaaggttacttccaactcactaaggatatgagcgcctacacaaaggcagccattttcagtggtgctggtaagaaaacaccaatgattgcgcgcttctcacaagtagctggtgaagccggctatcccgatacttatcgtgatgtgcgtggatttgcccttaagttctataccgaagaaggcaactatgacattgttggtaataatacgcccgttttctttgttaatgatcctctgaaattccctgatttcattcactcccaaaaacgagattcacgaacacacgcgagaagccaagacatgcagtgggatttctggtcactttcacctgaatcagtccatcaggcgacgattttaatgagtgatcgcgggattcccgctagttatcggatgatgcatggctacggtagtcatacctttaaatgggtgaatgctgctggtgagcagttctgggtaaaataccacttcaagacaaaccaaggcgtccataacttaagtaacgaactggctgccgaattggctggtaaagatacagattatctacaaaatgatttattcgatgcgattgaaacaggcgaccatccaagttggaccgttgccgttcaacttgttccttatgaagctggtttaaactatccgcaagatatctttgatgtgacgaaggtcatttcacaaaaggattaccccttaatcgaaatcggtcaaatggtactcgatgaaaatccaaccaacaactttgaggatatcgaagaattggctttctcacctgctaacttagttcctgggattgaagcttcccctgacaaactcctccagggacggttgttcggttataaagatgctgaacgttaccgtctaggtgccaactatgaacaattacctgttaaccggccaaaagtgcccgtgcataattacgaacgcgacgggatcatggcaaaaaaccaagagacaggcgtcaactatgaacctaatagtgaaaatggtccaaaagaagtcccatctgccaaaattcatggcgaccaacttagcggtcaaaccggtaactatccagccgatcccgattactattcagcagccgataagctttacaacttactaactgatgaagaacaagatcgactaatcgaaaacattcgcttaaatctcggccaagttacaaaacctgaaattcaaatccgcgaagtcaaacagttctaccaagcggatccagaatacggtcgccgagtcgcaacggcattaaatttagatttaaaccaatttgaacactaatctatacaaaaagaaggtatccggcccaccggataccttctttttatttatcttcttttggagaatcttgttttgctgcccattctttcttggtcatcaagtcagagacattcattttaatcttcgtcacgtttaaaccagtcatttgatgtactgatttagcgatgcgttcaattgtttgttcgaagatgtctggcgctgatttaccgtattccaagatggcatccaattcaatcgttacttcttggttatcaatatcagcgtcgacgccctttgtcggatcttcttggtctctgaaacgatcagctaattgactcatcatcccgcctgataattctaagacgccatcgatgtcatgcaccgtttggcccgcaattttttcaatcacaccatccgagaagttcaattctttttcgattttttcggtatgttgatccattgtcttatccatcattttatccattggtttgtttggtttatccatcgttttcatcatcctttactatttttattgaacgcgtttttcagaatcacttttctttggattactgccttgttgttgccattctttcttagtcataatgtcactgacatggctgttaacttcgacaacactcaaaccggtcattgattcgacagcttcagtcactgcagctgttaatcgttcgaaaacatcccgtgcattccggccgtattccaaaataatggtcatgtcgattgcgacctgtttttcgccaacttccacactgatgcccttcgttggatcactatcgtttctaaaacgatccgcaatatcactgaagaaattaccgttcatcgataataagccatcaatgttttgcgctgtcttaccagcaattttggcgattacagcatcttcaaaagtcaatttgctattggccatcacttcatctaaatgtgcttgttctaccattttgtcacacctccgttatttatcctgcttcaagacccggttaacttgtgatctaaatccttctagatcttccttagaccctgttaaactagctgcaatgtagccgagtaaaccagcgatgataatcaagattaaattcataaatccaaaactaatccaaatggctgccaacactgccccaacaacaaagccccaataagaacgtctcatttgtctcacctcacatcactttttgcctgattacttagcggtgatagtttgacattcactgctttaatcggcatctcaaagattgtttgtaatgcttgctgtaccgtttctttaactgcccgtgcttgttgatcgagatcgttgcgatccactgcgaccgcttgaacgtcggcagtcacttttggatgtcggcctttaaacgtcgtatggactaacacttccttaacacggtgtttttcaataatagcttgtgtcactgttttttcaaccgctttgcgggaaagtgctagttcacctttatcggtcttgatgatcatttggcgttttttcggtggactgaataatgccaatagcagtaaatataagaaaattaagccgctaagcactcctaatccaagtccaaaattaccgacccattgttcgggtagccaactaagatgcataaattgcttattggattgttgtagtggatagattaatgtgataaaccacgctacctgacacaacccaagcaaactggctaaactgatcaccactttagttaatttattcatggtgtccgcccctttgtattaggattttctacgtgtgaataataatgaaacaacgaaaacgacaatcacggcaccgataatggatggaattaaggccatcccggcaagctgtggtccccagctgccaaacaatgattggcctagccaggcgccgactaacccaccgacgatattgccgatccaacctgcaggtaaatcacgacttgtcaatgcccccgcaatcaccccaattaaagcgccaataattaaaacccataaccaatgtaacataacaatcatcctttcttgtttccttaaaatatattgctggttctccataaatgtaacaaattcaaccagcatccgtaaaacaatacgcttatcaatattattaaattatcgtaaatgcacttgtttaattaattgattcgccaccggtaacgccgtaaatttgaccggtaatatagcttgctgcgttgcttgctaaaaaaacatatagcggtgctaattccgccggttggccggctctttctagcaatgtattctgcccaaacttaggcaaagccccttccagttgtccttgagccaactgcaacggtgtccaaatcggacctggtgcaaccccgttgacccgaatacctttatccgctaattgttgcgctagattgatcgtaaaattcttgattgctgcttttgttgctgcataatctaacaaatgcggactcggattaaaggcttgcactgaagtggtcgtcagaatactgccgccagccggtaattgagacaatgctgcttgcacaagcgcatacatcgcaaccacattaacgttaaaactatcttgaacttgttctattggtaattcggtaattgatggatgcgcaatttgttgagctgcgtttaagactaatgtgtcaagtgtgccaatttgctgctgcgcggtttccactacttggctagcaatctgtggtttccgaaaatcagctgggatcaatgcgattttacgccctgcatctcgcaccaattgagccacttcttgtgcatccacttcttcacctggcaaatattgcaatgcaatgtctgctccttctcgggcaaacgcaattgcaactgcgcgaccgataccagaatctcctccggtaatcagcactttacgatctagtaaccgttgtgcaccacggtagtgttcttcgccacaatctggcttgggatgcatttgatcttgcaatgccggactaacttgttcttgttcttgaaatggctctgtccgataaagtgttcgcggatcttttaaatctggtttacccatcttcttgttccctcttttccaattaatctagatacactgcttttaaatgttcaatgtcctgcgttgttaatcctaaggcctgttgtaaataggcttgagttgaaccataatcctcattgattatgcgctcagctgcgtttaagtaggactgatcaacactcatcaatgcatgcatactttttaaaaagccgcttgaggcatctttttgacgtagcgtcttaatgcgggctgcaacgtgttccctagatgctgtattcgataatagataatcatattggatcacatcttcaggtgccccgagtgcatttaataaataataagccgccattccggtacggtctttgccacctgtacagtgaaataaaactgcttgttgcggatcggcttcagtcaataatcgttcgaagaattggcgatacattccgattgaatagggatcttgcaccatttctcgatagacttggcgcatttgttgctgcccaccaagcggattattggtgtagcgctcataaagttccgcttcactcgccgtactttgcgtcgcatcttctttaaaaattggcaacgattcgtaagatgccgtcgtaatctttttatctggcgcttttttgcgctccattggtgaacgaaaatccacgacataggtgatatggtagctttccaagagcaccaattctctcttactaagattcgccagattccccgttctgaataatcgatgcggtttaatcgagcgaccatccagtgtttgatagccacctagttctctgaaattgtagccatttttaattggtaatatgcgcgaaaccatcgactcatcctctctaatcaaccactttggctgctaggatcattgattatcatccaatttttgaagacacctttttaccgtcttgttactaaaaacacgaccatgatgatcaaattccaatggcccccagctctcaccgacgagggcctcaccgttattctctcttaaaattgcttcctccaaatcagtcataccttctagaaaacactttagattggctgattctttcttaatcaccaagcacaattctggggtcttgactgtactacgacctaacctaactttcctaattgggacttctttttgcataagtaaccttcctttcatgaaatttttaataacgctacaccatcaatataaaataatcacatttattgatgcaacttttatgattacgctttgttattgttagcacaatcatttacctttacaaagattgttgaagctgtttaaataaaaacagaacacctgaaaggagatggttattatcaacgctattaatatcatatttgccgcagatgaaaactatggtgatcaacttttaatcgccataaagtcggttctaacccatatttcgcccaaaactactattaatttttttattctcgataatgaactcactccgcaaacgaaacacgctgtttccaagcgcgtcccacgacccaatcaagttgagtttattgcacttaataagcagctttttgaaaactgtcctgaaagcaaccacatcaacaaaacggcttactaccgcattttagcgccaactcttttgttgcggaaaaaaatcgaacgtgtcttatatttagatgtcgatatcctcgtacaaactgatctcacgccgctatacaatacgcctttgggcacaaatatcgtaggtgccgtgattgatcctggacaagcactcacactgcgacggctcggcatcactccaccacaatcgaataacatctacttcaattcaggggtcatgctaattgatacggttcggtggaatcatgcatccatcacagagcggactttccacttcatcaatcatcatgcggatcgcttacaattccatgatcaagatgcgctaaatgccactttggttggtaaagtgaaactactccatcctaaatggaacgtacaaaactcattgctctttagaaaacatgcgcctatcaacactgaatatgcccatttatttgatgaagcaatcgccaacccggcaattgttcacttcacaacacacgagaaaccttggaacactctaaaaagtcaccccttcttaaaccaatatcaaaaggaactcaaacaattacatgcgcaacaatccgatataatcaacattgtatcggctgtcaattccgatttcatcgaaacgctggcaattctatacgcctcaattcttaatcacaatgactcacatcgacactatgctttttacgtcttagaagaccacctcaccgcacgagataaagcagtcttacagcatgttgtggctcgatttgatgccgacttgacctttgcagaggtcaacgaatctttactggccaatactgttgaaagtgatcggatcttgaaaacggcgtactatcggattctaattcccgacgtgttccctcacctcgatcgtgcactctacatcgattgcgatgcgctatgcctcacagatttagcccggctatgggatatcgacttaggccaatccttcctcgctgcagtagaagatgctgggttccacgaacgcttagaaaaaatggctatcgattaccaaagtccgcgttactttaactccggtgtgatgttactcaatctcaaaaaatggcgtcaacacaatattgtcagccgtgtactcgacttcatcaatcagcaccctgagaaattacgcttccacgatcaagatgctttaaatgcaattttgcatgatcggtggattcaccttcaccctatgtggaatgcccaaacaaacattttgatgaacaccatcacaccaccaactgaacacctcaaaaaacaattcttagaaacccaaaaagaacctgcgcttgttcacttctgtggtcacgaaaagccatggcatgcctcatcttcccatccattcacaccacaatatcgttactaccggcaacggttcttaaaacaaaaaaagcggctcgttcccttcgccaatcgccgttccctttctcaacaaggataactacaaaaaaagcgggtgcttagacaaatttatttttgtctaagcacccgcttttttaattgctaaaaattatctttttattgaccgactaagccatcatgaatcttatctaggttccacttcatcatcgtatagtaagtgtcaccttgcttccctctttgcgcgagtgagtctgtaaaaattttcgcataaattggtaacccagtttcctgagcaactttttccattgatttcggcgaaacagaactctcaacaaacagatgcttaacatctgaatctgcaatttttgcaagaaccgtcttcatctgttcaggtgtgccttgcgactcagtattaatttcccaaatgtaaaccggtgtgacctgataggccttaccaaaatacttaaaggcgccttctgaagtcaccaagacccgctgattagctggaatatcggcgaatttagtttgcgcatcagtatgcaatttgcgcaaacgtgcagtgtagcgatccgcatttttgcggtaatcatcagcgtgcgctggatctttggtctgcagcgctttcgtaatgttttcaacgtattgaataccgttcgccaaatccaaccatgcgtgtggatcgggttctgtttggttagttgtcaaatgttgcacctgaattcctttgctagcagcgaaaacatccttttcgaattgcttatgcgcgatcttaacaagttttctaaaccaaccattgccacccgtttcgagatttaacccgttatgaaaaatcacatccgcatcagtcgcttttgaaatatccgtcggttgcggttcatattcatgcgggtcagttccccgtttcacaatactgtaaagttcaatgtggtcttgaccaacattatggaccatatcttcaagaatcgaattcgtggtcactacacgtaatttagtctgctggttcgtttgttgttgtttagattgggcgcggtgctggatgaaaccatacacaccacccaccaaaccaaaaactgcaattaacgtcacaatcatttttttcatgctggtcgtcctcctttgcgccacttaaggaaaccttgcttaggcgcgcagatgaatgaaatggcaaagagcacggctgccatcagaacaatcgccggaccagatgcccagttcaatgtgtaactgaagtacaatccactgattgctgacacagcaccaatcccagccgataagaagagcatcgtcactaagcgatccgtccataaaaaggcggtggctgctggggtaatcaacatcgcaacgaccaaaataatcccgaccgtttgtagggctgaaaccgtgactaaggttagcaccaacattaaaccgtaatgtagcacctgcgtttttaacccatatgttttcgcataggtttcatcaaacgaggtaatcaataattctttgtagaagaatgagacgaataagatcactaagcctaagacaatcgccgtactcataatgtcgctatcactgacggcgagaatgttcccgaataaaatatgatgtaagttggttgcactttcggccatcgaaatcaggataaacccaagcgcataaaaggcactaaagacgaccccaatcgaagtatccgtcttaattttactatgtgttgcgacaaagccgattaagaccgccgctaaaataccaaatacagatgcgccaaccagcacattaattcccaacatgtacgccactgcgacacccggtaacaccgcatgtgaaatcgcgtcacccatcaacgacatcccgcgcaaaatgatgaaactcccgacaatgccagacatgatgccgaccattacggcggtcagcaacgcactctgcaagaattcataacgacccaacgcactaataaaagctggaatactcgtcattttgccacctcctgtgcatcaaacaagacagcggataagtccgcactaaaagcacgctcaatgttttgcgcattataaactttttcagttggtccataatcgacgatgccgtggttcatcaccactaaatcatcgaaatattgcgatactttattcaaatcgtgatgaatgacaatgattgttttacccgcatcacgccactgtttcatgattgccatgatcgcggtctcactctgtaaatcaatcccaacaaacggttcatctaaaataataatatccgcttcttggacgatggcgcgtgcaacgaaaactcgctgtaattgtccacctgacaactggccaatttggcgttgcgcaaattcgctgagcgatacttgttcaagtgccgcgcgactggcttgttttgcctttttaaccggatcgcggaataagcctaacttgccatacgtgcccgttagcaccacgtcaaaaacgttaattggaaaatttaaatccaaatctttacgctgttcaacgtatgcgacttgcttctgaactgcgcgcattggtcgatcttgatataaaactgagccttgccgtgccttaaccaaccctaatattgctttaatcagagttgatttgcctgcaccgtttggtccaatgatgccagtgattttgcctgcgtcaaactgaacggcaacatcagtaaatactggtgtgtcatcgtaagcaacggtgaggttcttaactgataacataaagagcctccattcttttaggtaaacctaacttttctcactacagcatacatgattttaatggaattaacaaatattttagtttaggctaacttttcgggatttctgtggaacaatggcttaggatgtttcacgtaaaacataataaaagagtcgcgctatttttaaacagcacgactcttgttattaattagaaatcttcgtcagcatcctcatttgaaacagtgtattgataaatccccttttgaccagatgctaatactttatctgttaatgcatccaatcccaagttgtcacggttgatgaataattcaagtaacatcggtaaattaacacctgatacgagtcgatactgtggcgcatcccgaatgatatcaaccatcacattaaaaggtgtcccacctttaatatcagtcaatacaaaaatttcagatagtggttcaaatgatgcaaaacttttattaatttgttggcgtaaagcttctgtcgtttcccccatttcataagaaacaactgctaaatgcacttgttgcccacaaatcatttcagcagcttgaactagacctctaccagcggcaccatgcgtacaaatcacaactccaatcatctctgttcctccagccattttaatatttcaattgacgatagtaacgtctaatttccattggatggcggttcaagtcttcgatgtgcacatcaattcgatcattgaccgcatgcaagataaatggtgataatgcaccgcggaattctggtgaaatccccggcatgtcgtaatctttcgcatcgataaccgtataattagcacagatttgtgggatgaagttagcaacgcgttggctcaattgtcgttgactatcttctgtcacgtaaattgtgactggtgtatcgcgttcaacaatttcgaacatcccgtggaagaattcttgcgcttcaattgattttgttctgagccaatgttgttcttcccaatagcacattgcatatgaatacgtagcaccccattggttaccagccccaacaaaataatgcatttcatcttcgtgatgtttcagtgcaaattctgtagcaaattcgtccgcatttttataaacagccacaacatcttttgcaaagttatcatccatttgtttgtagaattcgtcgtattgatcgaattcccctgctaaatacataaagcgatcacctaccatgaagaacttaagttgttcattcaatgggtatgaaattaaataatcacacatcgttgctaaatcggcatctacacgatcaacaaacccaattacacgtgcaccaatttcattacatttcttgacagcttcgaccatttcttgcgtatttccagtaactgaagagataatcacaaccgtgtcttttgtcactcggagattgccagttgttaagaacgaagctgcgttttcgtagaatgtttcaatttttgttctttctttcatgtgaacgaccgcttgcatggatgatgcataagtgccaccgatcccaatccaacaaatattactataaccctcatcattaatttgatcgacaattttattaatgtctgatctgagtgcaattccgccttctaagtttgccaataattctttttcgttaaatttcaacatctcaatttccttctttcaattttttatatttttgaatttgtaattgggtcaaaatctggaaaagctgacacttttagattaatttgcttgcgcgctgatgcggtataagccaataagtgaattggaatagtcataaagagtggggctaacaactcatcagttggtaacgctaagccgaggtcgtcttgacgatcaacttggccattcgtaattcggacaaccttcgccactttgccggttaaaaattgttgtaacttagcgactcgctcttgtaacttcccgtttggttcaatgaaaatcacatgatcacttgcgtggagtccaatataagggccgtgcatatactcttcaacttccttaccgagtgcggtaatacgcactgtttctgtaatcttagtttcaccttcacgggccacaccgtatgtgccaccataaccaacaaagattacgcgttgtactgtatcaaacacatcgctataatgcgctacccattctttagcagcatcaatgatgcgtggtaggtcagtcacaatgttttcaatcgctgccaaattcgtttgataactcgcttgatcctgtttacccaattcaagcgccaacaacattaatgtcaaaatcgtggcactatagccagcggtcacatagggcatctcttcaattggcatccctagtggaatcacatgctgacttagcttggcaatcggactgttttcatcaccagtgatggtataaatccggccgttgattgcttgaacccgtttgaccatctcaatcgttgagtagctatgcccaccctgggaaatggcgatatacaacgtatccggttgcaggtgcaacatatagttcgccgtaaaagatggctcctcgacaaaaacaggaatgcccaattgctggctcatataaggctgtgccgcaaacgccgcatttgaactcgatccagttgcaaaaatcacaacatttttatatgccgttgatttgtcattcagtaacgtacgcaatatcgtttgccgattggctaatatatcagcatagattttcggttctgcttcaatgtaatgcaacatatcctgcatgcttgctgcctcctacttcagtagacctgtgtaagcaccaaagattccaattactgcaattaataatagaatccagtgtgctttcaagccttttttatctaaccagaaaataaagagcgtaaagagtaatggcaagatgcctggtacaatcccatcaaaaatactttgaacagtcggcgcacctttacccgcaccaatcgtcaatggcatcttcagcgtcaccattgtcgccaccatcgatccaacaacgcccagccctaagacggaagcgccaaaggagagtttatccattaaacccgttttttgaactttttcgatgaagcccgcaccgatattgtagccaatgaataacccgtaataccgtgctaaaacagccggaatattgaagattaacaggaataacagcggccctagcagattcccttgaagcgctaaggaagtcccaattcctgtcgcaattacccgcaacgtcccccagaagaaggaatcccctaagccacttagcggacccattaacgcaatcttgatattgttaattgcatctgtgtcaaaattttcatctaatgccgcttgttcttccattgctaccgaaatccctaatggaaatgtagaaagccacggcgttacattataaaattccaaatgtcgtttataggcgctcgttaatttttctttactgcctttatagattttatttaacgctggtgtcattgcaaacgagtagcctaaatttgattgtcgttcataattccaggcccattccatcgtgaaggagcgccagaaaaccttcatcaaatcttttttcgagattaaactagaattcttcatcttcataatcgatgcctccattcgttgtacttgcagcaactgtctcgcctttatgtccattattgaaagctgagtagccagttaataccaatgcaagacaagccccaaagatggcaaccccagtaacagggactttcatataaaccgctaaggcaaatcctaatacaaagtaaattgcattgtgtttattgaccattaatttcaacaataacgcaaacccataagctggtaataagccggtcgcaattcctaaaccatcgatgacaaattttggaataaccgctaataatgacttaattactggactcccaacgatgaaagaaattgcaacgattaagccgattggtaaattgattgagaagaacccaccgaacaattgcatccgatccatgccctttgaattaccctcggccgcgtatttatctgccttatgaacaaagtatggcagaacaaagatgaagcacagattcttaataactagcactaacgatgcaatcggaatgcccaatgttaacgcaacggctgtactcttaccggcaccaatggcaaaggccgttcctaaaatactacctgaaataatttctggtggaatcgaagccccgattgaaaatgaccccacaaaggccagttctaaggttgcccccatgataattccggttttcatatcacccataattaatccagcaatggtacacgtcacaagtggtcgcgataacattgatgatccaaataaatattcagcattcgccaacatcgctgttaacgctaataatatggcaatcaatatatggttcatgagtttatcctccttttattctggtagtatcattttcttttcattcggtacttgttggataaagacgtctacaccagatttagaaagcgcttttaattgatcgacttctaaatcggttaagttaaccgccttagaataattcttcgttccttctcgttgttttgtgcccccaacgtttaacaatgtaatcttatcgcccgttcctttgattaatttctccgcatccgctactgattcaacaacaattaacaacttatatttatcggttgcgccagaattaatagcactaatactgtcatcaattgatttcatcactaacttcgcttgttctggcttcgccaagcgaattgctgatttacgaaagtcatcccccgccacactatcattagccactaaaatcgtattaacatctaattcgttaaaccaagaaactgcaacctgtccatgtaataaacggtgatcaattcttaaaaattctatcatgtgaagtcccccttaattaaaatcaatattaaattctgttgtatcagctggttcatagcgattcgaaatcccaatcactttatgattttcagcgtaatactgactgctcaatttaaagagcaacgcatcttcttctagatctaaatatttagcatgcgttgatgccatgctgacgagctgtaaatcttgctgcattccgtagaaattttccttagccgaattgacaagttcgatagtattgaccatctggatatccgcaagactcaaagtcggatataactgctgcggtaaaataatcgtttcgtaaacctgattctttttttcttgataaacatgtttgatggtatacaacaacgcgttgtcactgatatcaaataattccccataatatttatccgctttgcgaagatgaaattctttaatctgttttgctgcgttgcctaagttattattcttcatcacccccgtcatttctaaaatattttgcgaggaaatctggggtttaacgtatacccctacaccgtttttcttgataattagttctttagcaactaaattatctaaggctttccgaattgttgtccgacttgcaccaaataattgctgtaattcagcttcacttggcatcaacatcccacttttaaattcgctacgctgaatgcgagtttcgatttcgtctgaaatggtttcaaataagtattgtttcatcacaaatcaccatcctcacgataatcaaaaatatttttcgcatctaatcggtaacgaatttgattcccaatcagatactggacactatattcaaccggctcatcatcatgatcgtaagccaagcttgttacaatatataatggtgtcttctctggtatttctaatatgatagcctgtttcttatcggcatatcctgctttaatcgtttcatgcccgtagcctaagaccaccccatattgatccttcagtgtttgataaagggaccgattctgaaaagagatctgctcaatttctggaaagcgttcttgacttaaaaaagctaattcgtacgaaatgggtttcccattaatcattcgtttccgcggtagttcaaatacatgatctgccttcaaaaatcgaacaacatcttcttcgactggttcttcggtttgtaagacctcggtttgaatttcgtctggatttaactccgttgacattgaactcattgccagcatgttaatcacatgcttattgttaactgtcattcccacacgtggctttttttcaattagtccttcattttggaggactgataacgagcgccgcattgctgttcgactgataccatatcgctcagccaattctctttccgaaagattagcgaaggctcctttttggatatcgtatcgcaatcgttcctcacccaatgttgcaggtgagatttctttatattccaaagcgatccttcctttcaaattttaaagattaataactcttacaacctaattcactaaattaaaagatatagttttttatatttttaataccaaagtcattgtaagcgcttttttattttgtgtcaatcgttttgaaaaagtttttttaattggcatccattagttgattttgagtattggaaaatgacgttctagataaccagtgcattttaaagtttctaataatttattctcattattgcacattaaatttaatgaatatatttcgtaattggcttaaaaacccgttaaatcggctttaataaggatttttaaagaactacttctctttaacaactacatgcaacagatttgcatatcgataaaaaacttgctaatattaactattatcggtaatgttgttaaatatgtatattaataaccattaattcaaaaacaatattaaccgtagattgtcggccatcactcgtcacataaaggagcgcgagacagttcttaaccgaataatgctaaaaatagtttctgttaggagtgctacctatgaaagatttctttttatccactaagtcaattacgttaatccgtatattagatcatattatccaagccaatgaagcacccatgcttcgggatattatgtatcatttctcactttctaaattaactgcaatttgctacttaaaagagttgcaactagaccttgctgaattagacgccaatattcagctaacaacagtcaataaccgctatgaactcgattatcctgaaggaatgtcttctaacgcgattctttttgaacttcggttcgcttacattattcgaacaaccagctttcaagtgatggacgcgctttttaaacatcattacaattcggttcaaaccttggcagaagcaacaaatttttcgacctcatcagtgcaaaattgtattaaacaattatgcgtctatttcaacaccttctacgtcaccatttcatttagaggtaagcaaaacatcgttggcgatccgttaaacattcgcttgttgatgatttatacttatacatctatttatcgcggtagtgtgactcaggacttcatgacgacacgttcccagtatccaaccgcgcttaaaccacatttaagtttttcgcagcatcatcagattgaagcactggaatcggtcacttattttgatctcattcaaaagaagtattcgatcaccttaaaccctgaacttcaccaactatttgaagcaattaacaagactaatacgattacccttgaattaccaggcttacctgaacagactttgcttgatgaatcactgctgtttagctttttattgcgcattgccgttgctaattacgatacagacaccgaaaaaatcaaaattactgaggctattttggcattaaatactgattttacaaacgatgttaatcacctactattggacttctttgaaacctatcagctgaactacactaaaactagttttctgatttccttttattatttagtcattaccttcatttatctcacctatattactttcgatatcaccgactttgtgatgtttaatgacacggcctcaacgttcaaacaaatcgatattgattcttatcaagaaattgatcatttaaatcaatttttagctgaaaagaaggctcattacacaacattaccagcgaattcaacgggcactctattaagcgaaatgttcttctttttgctcgactacaatccccaaatcaaacccttaaaaattaatatccgatacactaaaaatttctatgcagcgacgatgattaccaaaaatctacaaaatgtgttcaggtcttcaattgtgttcactgattagatcgaagacgcagacctcatcatctctgatcactacgaacatgacgagtctttaaacggacaattcttcttattcagaaataatttcgaaccagacgattgatccttattactgaagaacgtattagcgtatatttatacgaattcttttcataaacgactgaattaaaaaccaccgtactgctaaacagtacggtagtttttgcgttattgattttcaagttgttcttgcaaccattccagattaacttcatgatgccgtttagaattagtcatcatcttgataaacatcggttgcaagtcagccggattggctagtgccgcgtcaatcgcacggattttagcctgtgtctgttcgatttggctttttaacagcttatccatctgttccggtgtcacttgatccgtgaataatagtggtgtgtagaacggaaacgtaatcggcttattctggcgaccataatgggcaaattgttgctcaaaagccgttatgccagcggccgttaattgatagcgattcttttcccgcttatcgggcacgtcgtccgcgactttttcgatcagtgccttttctgccagctgctgcaagttatagtaaaacgagcccttcgtgaagttcacgaaaaaagcgtagtattggctttccatgtcagccaataattcgtaaccatacgcgcccggctttttctttagtaatcccagaattaaaaattgaatcatttactagtctccttgcccgttagctgtgcaataaagtcggcataactcatttgaccaaatgcaaaatcacgactcaatcggtacatcttttcctgctgtgattctgggcgttgatagagttggtctagttgaaccgcttcatctgcaaggacgtcaggaacatcttgatgctgttcgaaagcttggaaataacgaatcccaaaacgccgttgcgaggccgcgtcaatgtgaatcccatctgggttagccgttaattcggcagcgttgaccaaataactgtgtggatcttgcgcgacaacttgcgccatttcgcgattaatttcgttaaattccgtggcgctcgcgccgaaccctactttgcctaaaaaggctggcaattgacccgcaatgattggtaaatcaggttggcccaatgctgcacgtaaatgattgaagaccgccgtcaacttggtcgcatacgtttgatagccaccatttaaactgtcactttcaccttgatgccataacaccccgattaactcactagattcctgtgcaaatttcgcctcagtaatcgcgtgacgcatcaaaagttcgtcgctcgcccactcatcgatggtgctcccaccttccgcgcaggggattaaccccaattcttcatcaggatgagcttgcacccacgccgcagcaaatgacgcagccggcccaacacccgcaacctcccgatcaaaatgaatcggttcggccatcatttgccagcgcccattgcgcagcatcttcacgcgctcgtgccgcaatcccggcacatcttgaataaatccccgcccagccatattcgactgaccgactaataaaattgacttcatcataaaaatcctcctgaaactgatttttatagtacagtctaattagactatgaattcaaaaaattctaggtaactaataacttagttacctagaatctaaataaaaattaaattactctgacaattctgggtgatcatttaaaaattgtgctattggtctcaaaatagttcttgccaattgaactggaacagcattaccaatttgtttatattgtaaattaagtctattatttttttgtactgtactcttccctccatcactaaatgagaaccaatcgggaaacgtctgtatacgcgctacttcccttacactcagtcttctgtttatttcccctgaaaacctccataaatctttttctaccttaaccataggtttcccaccaggccacataggtgcctgtctgccactggcctgaatagtaaaggactgttcatcccaacctttcttcctattacgagacatatacattgatgaaaaaccaccatcatatacatcttctggatctgttggtaaatcccctattgcatcacgtaacgtaacaaacggaatcttattctctccatgagttgggtctggaagattgtagctccagtcatagttgtctttaattttatctttatgcgtgccgattaaaataactcgttctcttaattgtggtacaccataatctcttgaatttacaagatgagcttgtacatcatatcctgcagatgcaaaatcctggactacctgtctaaatacttcaccttttgctagagtcatcagccctttcacattttcggctacaaaaaattctggctgcgtttctaataatgcacgaataaaatgtacatataagaaattccttggatcatcaattaatcgcggtcctgctgcactaaatccaggacacggaaatcctccgaccattatttgacaattaggaaaatttgaaacctgacgtatgtctttactgtgtttaaagataccttcttgaaaattctgaatatatgtttcgtttgcttcagtaaatagatcatttgaatacaccgtattaaaaatactatctttacgaatatcttcaaatgaatttctttctttaagtgcttcatcaacacttatactacctttattaacatctaaaccagcaagttccaatcctaaatccagaccaccagctcccgagaatagactaactacattgaatttcctattcattaatctaatgttctttattagatcatcctcatcgctacttatttgtattttttcacgttcttcattaattttattcaataaaatacttctcacttcatcaggatctaatgttgctgcagatataaacgtactcatacttcagtcctccatatagttcgttattttatggtaacatattatatttaacttggccagttctaatatttgttacataatgtacaggacaatacttttattaataaggggttaattatggcaaatcaatcgttgaatggaaaagctttcgaattcgcatgtctctctgctctaataaaatttatagaacaacctataataattgataaaaccgcacctgcatacatcactgtagaaaaagacttcaattccctttcttccgacgatcaaaaaacaatgattacagctgctaaaaaaggtattcaacaggttatagattatgaaccaaatttatctatagaaaccacacctctacatttatatatccaaactgatagcaaggggaagactggagatgtaagagatattgtttgtataaagcccgaggagaattggcaaattggtatctcttgtaaaaataatcatcatgccgttaaacattctagactatcaccaaaaattgattttggaaaatcttggatgaatgttaaaaatacagatcagtatcgtacagatacactacctgtatggaactttttgaaaaacactatcgaagaaaacccagatacaaaatggtctgaccttaaagaatataaagagacattagtttacgcccctctcctagaggcgttctctaatgaattacggattctatgtaaagatacgcaaaatatcaagaatcttttctattatctattgggttcttatgacttctataaagtaatagccaataaaacaaataaaaatacagaagtaatgatatttaacttatacggtactttgaataaaagcgttaacggcataaaaccaaaacggaaagttcataaaacattactaccttctcgattgtattccatagaacccgcccaagataaaaagggagtcagcccaacaaccatcaaggctgtttttgatgactggagtttaagttttagaatccacaacgcccggactttagtggaaaattcattaaaattcgatattaatttaaaatcagttcctactgatcttcaaaatatcatctctccttgggaataactcattaagcaaacgtcttcatacacataattgatgtataattctaccatcatcttgtcttaactcactttgctcctatcctagtatttggtacataaatttctgaacagttgtgccataattaataaaacaagataggagcattccaatgaaacgatatcaagatgattttaaagccagcattgtgaagatgcatcgtgaagagaaaagatctattcgctcgctttccgaggaatacggtgtttctccagccgcaattcataactgggttaaaggcgctaaatcagttgagctagaagacggtactgaagtaacgtccaaagaattcaaacaacttcaaaaggaaaatcagcgattaaaggaggaacttgaaattttaaaagctgcggcggtgttactgggaaagcattaggacgaattaattgccttgtcttcatagaagatcagttattgcgacaccgcttatcaattattctttcggcactgaaattaccgcgcagcacctattaccattggaaaagatatcaacctagtcaacacgaacgtgttgataatcagctcaaagaaaaaattaaattgatttgggaaaataattatcgtgcctatggttatccacgaataacgatggtgcttcgcaagtcaggcatctgtgttgggtcaaaacgaattttacgattaatgagggaaatggagattcactctttaatgaatcggcgatttaaaaaacctggcactcatgtggatcattcacaacgccccaatttaatcaagcaccagcccaatgcaaggatatggcgtgctgacattacttatttggaattacgtccaggaacctgggtttatctcagttctatttacgaaccaaaggttcatcaagttcttgctttcaagattggtcgtcagatggaggcgacgttagttgtagaaacgattaatcaggcgcttgaatgtcatcaaaagccacaatattttcactctgacatgggttcacagtacaccagcaacgaagttgaaactttacttgaacggcatcagattagccactcatactcaaaacaaggttatccttatgataatgggccaattgaagcttttcactcattgttgaagagagagtttgcctttcaaacaactttttccaattttgaggacttggtaatccgaacctcaaattacatcagttggtttaattccgacagaattagaacgagtgtttagaaaaagatgtgccatttattgacataggagcactttatattatctttcatcggtacaatactaatatgatacttatactttcatctggtatgtgctaaaccgctgtcgcattttactttagacatgataaaaattcctttcgcttttagatttggttagtaaccattctctagtatcgcgaaaggaatttttacgttacagcgtattctaactcccacacctaaaagcaattcaatctttgtatgtccatcctctgtattatataaatgaggctcctatgtcaagaatccggacataaaagtacgaacaaatttgactttcaatttaaattacttaatttaattttcggagcccgaagttttagccatcgtctgtcaacaactatttttaattaattattacttagaagttatagctccgtaagcaacatataatatattatcacgataagatttaaataacaagcgttttttaaaatcttttttatttcgtatcgctgagtcatcaaccatacgtccctcgtcgagacaacttttatatattaccaagattaacaggcgcggtcaagctttttattaaaaaagctttgaaaagttaccagcaacgtttcatcgttaccaataacccttcaaagctctacggtatccctattgtttaatgagtgattcaacattcaaaatcttatcaatccagtcaccttgatagaagtcttcttcatgagtaacaaggagtacgccaccctcgaaggcttggattgcttttcgtagtgcattcttcgtatcatcatctaaatggttcgttggttcatctaatagaagaaagttgcttgatgttaatagtagttcggcaatcttcaccttcgattgttcgccaccactaagttgtttcaaaggcttcatcgcttcttcggcagttaaaccagtccgcgataaaacttggcgtagttccttttgtttctgatcagggtattcgccttgtagatactgtaatggcgttaccatattattcggccacttcaagtcttgtttaaagtaaccaaacttcaccgtactggcaatctcaaagtccccatcgattgctggaatttctttaatgatcgttttaatcaacgttgatttcccaatcccattaaaacctttcaagaccaccttctgatcacgaccaattgaaaagttcaacgctggtagtaacgcgcgatcgtaaccaatctccaaatcattagtcgtcaatagaatctgactggccgttgcatgatatggaaagcggaagttagccttcacgcgattacttggtggcgtcaaaatatccatatgtgccaattgtttctcacgactcttggcaattgtcgaacgggagcccgctttatacttgcggatataagctttcgttttttcaatcttcttttgttggttctcataggcctttaaataactagccttattctcttccttttgccggaaggcttgttgtagtgtgccggtatacttcgtaatcttaccgaattcgatatcggcgatacaggttgtcacccgttccaaaaagtcataatcatgggagattgtgataaaggcgccttcgaaatgattgagataatcactcagccaatcaatgtggttcgtgtccaaatagttcgttggttcatccagtaataacatatcgggttcttctaatagtagtttcgctaaaataatcttcgaacgttgccccccacttagttgtgatacatcatgatccatccctaatgcatcaatccccaagccagtggcgacttgcataacgcgtgtatcaatatcatagaagctttttgcctctaatagttcttgaatcgcacccgctttttcgagcaattggtcatcaaggctctctgcgtagtccgcataatattgactcattaatttttctttcttatataaatccgcaaaagccgtcttcaaaaattcaaagatcgataatcctggtgctaacttcgcatactgatcgagataaccaatcttaagattcttttgccacgtcactttcccttcatccggaagaatgacgcccgtgaggatattgattaacgtactcttacccaccccgttttggccggtaatccccatatgttcgcctttattcacttgaaacccggcgtcgtcataaagttgtttatctaaaaactgttgtgttaggccttcgacttttaaaatactcattgttttattcctactttctttccaaataaaaaacaggggcagcatccgctacccctgtcatgattacaatcattgactatcgaccactccatccatagtcactacccaaataaaccactgtcaccagtcgttaaatccagtaatgtcctatagatgacttttaatcaatattaggctctgcacgatgcgtcatcttcaaatatacagagcgaagcttcataattaatggtcgttcaattaacatgtaatcgcacccttcaataagttagtcctatcctaacatagaacaatcgttcatgcaaaagccttagctaacccgtgcacgcaacttcgctaacagctgtgcgcgtttgcgccgagaaatgattagacgcaattcaccgcggacaattggataatccttagccctaccatgcatcattgtcgctaagtcttggcttgttaatccttggttagccacttcaattttgatcatttctgctaaatacgtactatagaatgcattaaacccgacatataagcctagtactgcactgattagaatcgcaagccataaattgaaattcaaaatcgtctttaaaactaacatgccacaaataaacgcaatgaccgtggccactattcctaatatgattgtatgtcttggggcgtctttcatctgctccaccttcttaataatgattaatcgtttacatttcatttatattatacctaattttagccgcgataagcagtaaaatcacttaattcttcaaattaaaaaccgctaacgtcaagcgagacagtcaaccgcgtttactagaatgggaggctatgtattgtaaaaattgtgtatatattgtaaatttttctgtttttatccccgtaaacagtctagaattgtagtagtgcttttttgaataatataactatattaagaaggataattgaatctatatgaaaaacattgctttgaacatccgagattttttcttagatgacaaactactcttagccgctgccatcgcagccattgtcacctcatttttcaaccgcccacaacttagttacgttaatttccacgtgatcgtcagcgtcttttgtattatgacgctcgttcaagtttatcaacggctccacgtgcttgattacttcgctcgcgaattaattatcaaaagccgttccaaacgagccttgatgcagatgttattagcactaacgtttgtcggcgcgatgttcttaaccaacgatatgacggtattaacgttcgtcccgttattcatcttaattgcgcgtcaacttgaattttcaccaatcttaccggtgacgctcatcacgatttcggctaacctcggttcttcattaacaccgtttgggagcccgcataatattttccttgtttcgttttaccatatgacgattcgccatttcttcgaatattcaattcccgtcttgattgtcagcgtcattatgttggcagcaacgaccttcctctttccaaaagaacccatcaaacttcacgggttacatcccgttgaagttgaaaaagggccactgtggtatttcgttccattaacggttgtcgttttcctcgcagtgttctcattaattccattatgggtgacaccaattctagtgattatcgcgattctagcgtttgatcctaagttattcaaaacagtcgattacggcttattactcacattcttctgtttcttcatcgctgttgggaatttaagtcacatcccaacgattgccacattcatgcgatcaattgtcggaacagcaaaacaaacttacatcaccgggattatcagttgtcaattgattgcaaatgtcccaactgaaattttactttcaagcttcactaaccacagccacgcaatgttcttagccatcaatatcggtggggtcggcacaatgtttgcctcacttgcaaacttgattgcttacaaacgatttaagaaaggctggggcaaagaccttggtaagttccttgtcgttttcactggcatgaacttcttattcttaatcattttaggggtattcggctattttctcatctaattcttaaaaacagggcaactatctttacgatagttgccctgttttttgtcattttaacagtaatcgtcatgatagcattcccattcgcgtcttactgccgatcaacgccatcgtgacgccctttaattaagtccctaaattttacaaacatatgactaacatgacaaattaccccatttctgtaaagaaactgctatttaattgacatgcagcattgatatactctcctagttccaaaacttacctaggagtgacgctttattatcaaaaacaaaccattcttgttagctatcggccttatattgctgatgctaattacaacgaatatcgcgcgtgccgcattaaccaatgaagcagcaccagaaacgaaccaccctgtccaaaagctgatgtcatctgaagccattgaacaattcacggggcaacctgcccaagcagctgaaatgtcactggtcaaacacgcaactgttctaccaacagacaaacccgttagctgtccgattcatccagatcctgattccgcagaaattaaggaaccaacgcccgcccctgagccagaactagttgcggccccagcacctgccgaaccaaccttaattgacaaagggacattcaaattaaccttttacgatcccgcggtccttggcgcaacaagtatgcccggtggaatgtacgccggagtcgctgcgcacttgggcgttatcccccgcggctcacaaatcaagatcacattaagtaccggtgaagtatggtaccgtgttgtcaacgataccggaaccttcgccgcttctaactcacaacaattagacgtcgcaatgccaaattgtgacatcccctctgccggtgtcttaaatgccaacgtgcagattgtccaacctgcttaattaaaaaaagccaaccattcagatattacctggatgattggctttttttgatgttcaatttagaaataatcccataacatcggtttcgtatgactaaacgcagcactgagttgagcgatttgctgcggtgtcccttgcacatgcccaaagtgtgcttgactctcaagtgtgcgataccccaacatcgccttagttagattttgaatcgtaacggtgatgtctgcggtccccgttgctaattttgtcacagcagcttgtcctgcatgaatacttaactgccataaaccggcattttcaggtaagaaatcatcttgaaccgcaatcgttaccgcagatagttccgctacttgataggcataacgcgcgaagaaatcagctagtgacacaatccgtgccatcatataagggacggttgtcgtctttacgattgtgggatcaggcaataaatcagctagcgactcagtcagtgcactctcatactgaattatcgcataagctgactgatgcttaagaataaagctcaatagctgttcttgacttgcaactgtcgaggtcatcagttcttgaatcacaaacgtctctggttggcgcgtataaatcatataccccgcgacccgtcctgtatcttctcgatagaccgccacttcccaatcactatgcttcataacatcatattgccaccaccaatcagtccgctgcacaccaccgacttgattgtccggatgctgattgaagaacgcatcaatcaacggcaccgcttgcgccaatgtcatccgtactacttgtcctgcactcggtgcaaatttcaatcgtggtaagtcagccgtttgaatctcaaagtgcgtctgatcaaaagtttgttcatagccaaaccgacgatagaagccgtatgaaaatggcgcgagatacgaaagcgtcacaccttctgcacgcatgtgttcaaacgcgagttgcatcaatgctgcaatcccacctttgcccgcaaactcggggtaactcgcgacataaccaatgccactcatcttaaaggtttgcccattgagccgtacgtcaaacggcgtcgctaataagccacttgccaaccggccgtcatcaaaaacgccaaaccctgcactatgtgtatacaactgtttgaagaattcttggcgcttagcactatccggtttattaaacgcatattgtgctaattcataaaatgctggttgatctgtttcaattaactttcttttttcaaccactgcacattcctcctgccatcacttatctttcactataagtgagcgagcaacaagatgcaagcgccacctttgtgattagaccgctttttgcgcataaaaaaaacgaccttttcttgggagtggtcgtttttttatagggagaaatctatgggtattagggagttatttcgttaacgaaattgtacgaagttgttgtgaattcactagaattcgttgcatcaactcgtgaaccgtaaaacgatcagttggtgcatagttcaagattaagatatgcacagtttcttcacatttctcaatgaccttaccgatatacgtcgcagacataatttcgtttgattggccgcgaactaaatcacctacttgaatcgccatgtccagttcacctcgttaatttatttaaccatgacctcattataacgaaactgctttataaaatcaactatttacttatcgtcataattagtagatgcttgtgattggttaagcagattgcctatttttgaatcttgcgatagtcagcatcgaaataccggccttcttgaatatcttcaatcataccttcataaggcgcttcgctaattacgtcttcgttattttgtcctgcatcacccatataagtgattgtggcaaattcaggcactaacatcttaggatatgtttcatatttttcacgtgattcttccatgagtgcaatgtgatcattttggtaggtcactgtgatttctggatgttcttcaacccatttagggaagaaaatcatgccgtgtaacttgttttcgtttggcatgaagtccaacgcaacatcagtcccagttggttctgtccaagtaatcttgaagacgccgtccgttaacttaacgatgttggcttcttgatcacgaacccaacgacctgcaaccatcccaccatgaattcggtagtcaactgtgtggtcgttctttgcataccattcatactcccaaccattatcgtaagtgtaaatgaaatgcgtccctaagaaatcttctaattctttaaattgttttgtcattttaaaaacctccatatcatgtaattaaatacatgtttttcttaacttgataagagtactgctcaatcctttttttgtcaactttaaaaaagggcaaaaaaaatcgccagcaaatagctgacgatttttcttaattgatttcagttgctaattggcgtttcaccgcgtgtttaagaatcagcggtgccaaaacagtggtaatgataatcacgaaaataatctctgagtaataaagttcactcaacaatttagcgttgtacccaatctgcgcgataattaacgccatctcgccccgcgaaatcattgccgcaccaattgtataggctccttgtggcgaattattcatccaacgcgcaccgagaccacttccaattaacttcgagaaaacagctaacacggttaaaatcgtaataaatagaatatgttgattcaagcttgctaagttcatcgataaaccgatgctgacaaagaataccggaataaacacggtatacccgatcggttcaatatggcgattaatttctttcttatacggggtttgcgaaatcgcaatccctgcgaaaaacgcgcccactaccgcactcaattcaacggcctcagcgaaccaaacaaatccaaaacaaatgattaacgatgtaatggcgctcgcatatggtactaacaaacgacgactcaaatgcataacaaatggcacaatccatttcacactaaagtagaccgcaaccatgaataaagcttgcagcaataaactcaaccccaaactcatgtgggttgaactagctgcagccagttgcgccccaaaaagactggtcaagacactcaagataattacggccagtaagtcatccactaccgcagcacctagtataatcgtcccttctttactttctaacacgtttaattcacgtaaaacttcgactgaaatcgatactgaggtggctgcaaaaatcaccccgatgaataaactctcaagttgactaataccaaaggccaagctcatcccatacatactgatcaccgggacaatcacccctaagacggcgaccactaaacttggtttgaaatacttcttcaacaaggtcaggttactctccaagccagcgatgaacatcaataacacgacaccgatttcggaaaacgtgtggataaaagaattttcatgtaagacaccgaacaacgcgggtccaagaataatccctaccaggagttgcccaatcacagccggcattccaatccgtttgctcatgtgtcctgccaataaagtacttattaaaataattgctaaagttgccattgattcatttccctccataaaaaaagcacgccaaaattcccttctaccaccctaaagaaggaaatcttgaacgcgcaatgcttcaaccgtttttttaacttatgtaataatattaccacaaagccacactgggcgcaaagtttagacgttgaattggtaatagtattcattagattgacatcgctattttttcatgataattttagagtaataactaactggaggtgagtatttttggatgacggctcgggcgaagcgttttgtttaatccatcagattattccttattatcggcaagaataacgatcacgaacgaccgcattttgactttcgataattaaaaggagcttaccatgactaaaacacacgcttatcaacaaacattagacgaactgcaaaccaattatgcccaccaagattttgaacaggggctttcgcaaacagaagcggttaaccgcttagcaaccaatggtccgaataaactcgagagccatcacaccccgaagtggcaacttttcgtgcgccaattcaacaacttaatcatctacatcctaatcgtcgcagccctattaacactcatgatgggtcactattcggatgccatcatcatcggtctagtagtcatcattaatgccatcattggttattatcaagaagcgaacgcatctgatgctttggaacgaatcaaagaaatgttggcaaccgaagcaaccgtttatcgtgacggtcagcggatcgacatcccaactgaagacttagtggtcggcgacgttatcttcctagaagctggcgatagtgtaccagcggatttacgaatcgttgatgccgataatctgcgtattcaagaatcagccttaaccggggaagcagactcagttgaaaaaattgcaacacgcttaaccgaagaagaagttgcccttgccgatcaagtcaacatggcctttgcctccacttccgtcactaacgggagcggcttaggcgtggtcgtcgcaaccgccgctgataccgaaatcgggcaaatctcagttgctgtcaccgaaacgaaaacccgcccaaccccattgactcgcgaaatcaacggcttagggaccggcgtttcatttgtcgtcatcggtgcggccgtctttttattcctcttcggcttacttggcgaacattactcactctcagtattagcaatcgcgattgtcacgatggtggtcggttcaattcctgaaggattacccgcaacaatgtccgtaatcctcgcaatgggggtcagcgacatggccaagcacaaacacgccatcgtcaagagcttacctgccgttgaaacgttgggctccgtcgacgtgattgcgaccgacaaaacggggacgctaactaaaaacgaaatgaccgtgaccgaaattattaccgccgaaacgacttaccaagtcagcgggaatggctatacgcccgaaggtcagattttattaaatgaccaacctgctgaattggataccaccctcacacaattcttagaggctagttatgaagccaacgatacgacgctttatcaagccgacaatggttggaccattaacggtgaaccaactgacggtgcctttttaaccttatatcataaggttcatggtatcgacgacttaccaacaaatacagaaattgacatgttacctttcgattcggattaccgctacattgctaaactcgtgcaactaactgatggtacgcaccgaatctatatcaaagggtctccagataaattattcccaatggcccaacaggcaatggtcgatttcccaatcgatgactggaatgccgatgtgacccgtttatcagaacaaggcaaacgggttgtggcggtcggttatctcgacgtgccaacaacgactgctacaattacccatgaacaactccaacaagggattcaactcttaggggttgccgggattatcgatccgccacgcgatgaagtcatccaagcgctcgccgaaatgaacgctgctggggtcgatgtcaagatgattaccggtgaccatccactgacggctaaagcaattggtgaaaagttaggcttagcaccaacgattaatgcgattaccgggccggaatgggatcgcttgtcggacgctgaaaaaccaaaagccgctttagaacaccaagtctttgcccgcaccacaccacataacaaactcgaaattgtcgaagccttacaagccagtcgcaaagtcaccgcaatgaccggtgacggtgtcaatgatgcgcccgcattgaagcgcgctgacatcggggttgccatgggaattaaaggaaccgatgttgccaaagattccgcggatatgattttaaccaacgataacttcgcaacaatgtccgtcgcaattcgtgaaggccgccggatttacgataacatcaaaaagagtattctcttcttactcccgacttccttcgcggaaggcttaatcatcgccttcacgattttgatgcaacaagatatgccgttgcaagcgacgcagttactctggattaacatggtctcggcgattacgattcaattcgccttcatcttcgaaccagctgaagatggcttaatgacccgcaagccacgtaagaccggccaagcgctgatgaataaacacgatgttttccaaatggcatatgtttccgtcttgatggccttaatcggcttgttagcctacgattggttactcggccgcggtgtcgatcaagtcacagccagcacaatgatggtcaatatcattgtcatcagcaagattttctacttgttcaatattcggactgcgaaactcgccttttcaaaagctttcttcaccaaccaaaaggcattcggcattatcgcactgatgattattctccaattgatcctgacctacgtgccattcatgcaacaaaccttctacaccgaaccgcttaccttattagaatggggcgtttcgatcggcgcaggcttcttgattctaatcatcacggaattcgataagattatccgtttaatctgggcaaaaagaaaggcatagtaaaagagcgttcttctcgataggatgagagaaatgctcttttttggtgtgcttttcgaaactggcttttccggttaactacaaaatgtgacttatgaccaaacccgtcataagtcacatttttaggttaatcctcaaagtcgacccgcttcaaacgcactctaaacgtgcttcggcaagcatatttctgtacttaaccaaattcacccaatcggcgattacatcgccaattgggcaaatccagttaatgctcaaaatataaccgcttgtctacgcactctataatctactaatcacttcttctacattcttaatctccaccgacattgtgccgtctgggtggttgatgaattcaaatagatttgggttttggtagacgtcgattgggacgattagttcgatgccgtttgagagtttgagtttttgtttgccgtatttcttttcggcgatttcgcggacggctggtgagattggcgctggtgctgctggcgcgttttccgtcatttctgctttaaactcactttgggctgaaacgttgtctttaaaaatcttcgccgccatctggctcgtatcgatttctccattggtttcaatcgtgtcgtagatcgcttctttgacgttggcgaccacatcgtgtttggcaacttcgaatttcttgccgattttttcagcggcttttttaacaaccttgacgttttcttctagcgatggcgctggttcgctttcaatcacgttcgttgataagtaggtcatcttttcaccggagaaggtgtacttcttctccatcaattcaaagccaaacgtctggaggttaatcgcaaacccttcgtccgccttttgcgttttattcgatagaatcgattggtgaataatcagttgattcatcaatggtccctcttcagcattgacataatgggtgaaggcttgatgataatcgaccttcaaaaaagccaagtaagcttgcgcatcttgttcatacaagacaacaaacgcatccgcactcggtgcatcgtcacttttttgatagaccgtgtaccatttttcaacgaggcgttggctagcgccgataaaatcagctgtcgcatcgcgcagaaaagatgcgagctcagcatcttggcgcagcacgccggtcttactctgggcagacgataatttcttaatcttgttggttaaatagtcgcgtgtattcccattggtaagatctagcacctgttgtgagtaaattggatcgccgagttcgcggtcgaccacttgtaaaattgcttgtttcaaataaatatccattagttaacatcccatctgtctagcgtgtaaagtattgagcgccttcaatcgtgtggaagaaaatcaccgtttcgaccatctcattgttgacgcttttcaaaaatggccattcgccttgtaacacacggagtgccgtgcgcggccgtgataattcccgttcaaaattggtctgtacctgaacgggggtgtctttaaaaatgtgcgcatcgtataaatagcgcgcatatgccgcaaaaatttgttgggcctgttccgttttaatcgcggcatacacttcacggagtgtctgcagtccatatgtcatcagacttgccaacatcaacgacccatttctagtctcaacacgtttcaaatagcgaattagattgccccagaactggctatacgcctgaatctcatcttttcggagatatggtgctacgtcagtcacaaacgggtaatgccaatttttagcattcaaataacgcgccgtcccaatgtagaacgtatacggaaagccaaaatagatccgcgttaaatctttaatgaaccattcattttcaattgtagcgtaattatgtcccaaaatcgcgtggacttgcattgctacagctggatcttgcgtattgttgtgcttagtcaatgcgaataattgttgccattttgaagcggataaaagatccggccgataatgctttatttgttttaactgaaccggggcagcattcaaggtatagccaccatcaaacggttcatccaataattggaccgtctgcacaaaatgccccccgagtgagtgacccagtccatagatgattgttgccggattaattcggcgcacccgccggaccacataccgcgtaaaccgccgtgcgagttggagttgctcatcattttcggtgttgccaattagcatcgcatcaatattatacttccaatcttgataactctcacggacataattatccagccgctgcgtaaacgacttaatccgcggatcatccatcgtcccctcagtccccttgtaggaaatgtaggtatacgattggcgattaagcgtgacgtaataggcaattgccgaaaaaccagtttgttccgcattcggcaaaaccgttcgcgcgtcatagtgaatcaccgcttccgccgcttgatgcgcgtgaataaacacgaggtacttcacgtaatattgcaattcctgcacgttaaaatactgatctaaataattaagggccatcatgtccattttaaaagcgcggctatcaaacggatcggccagtatcggtcctggcttactcgtggccgccactttatcaggggctacatggtataaataggcgagcgcctgcttcgtcagtaccgtactctcattgattttttcattttgtaaattgataatcagttgtttcaaacgattaatcttgcgttggcggttaaattgcggatttgcttgaacggctgccaaactcgccacatccaatgcctgcagtcgccgtaacttggtccacaaatagggatcggctcccgccgtcgccaataattgatttaatagttttgttttacttgttttaagttgttgatagctgaattctagtcggttattgcgccgtaataaggcctgcgattgcgcacggtcaaacgtcaacggcacatctaaatgcgctttgaacaataacttacccatgtcatcgaagacttttgccaaccgaaagagcgtcgagatgatcactgtcgtttccatttgcatcattccttatttttgtaatacttctattataaagtatctgactcaaaaaaactgagacgaaatcgtcccagcttagatggttttgggtttgatgcgcacacctggttcaaacgtgctttttggtcgcaacaacttccgcttaagctaaaatcaccagtaactccaaaaacggattactggtgattttgtcttaatgctcatttgctaaccgcgaccaaacgcactctgttcttaaacgtgcttcagcaggcatatttctgtggctaaccaaatttgccaaattagcgattgcgtcgccaattcggcaaatccagttaatcctaaaaatacgaacgcctgcttacgcactctgttctatgcagtaatttttttgtccacagcttggacacactagttgtcttgtctttggcgtgtgccgggcaaagaacattttacttaggcgtggtttgaagaccgtcttgcaattgggacatagatagacagtttcttgatagtagaatgttgtcacataaatggccatcgcaatgatgaccggtatcccaatccacattggccaccaaatgccacttagaaacccaagaattaataagccaatttccacaccatcaatcaataagccccacatcagcattcgccgatgtaatctttttaactgtgttgttttagccattgcgtcttctatgtcgctgattgtcatttcaaaaggcaccgcgctagtattttgaatcgattgcagtacaaactgcaacgctgctttctggttagctaagtctgtttctttttggactaactgattgagttgttgttcgactaacaatgccagtgtatccgtcgaagcttgactcgccatcactttttgaattgccttcagtgaaaagcctagctgcttgtagcctagaatgacttttaacgtctgcacttgcgcatccccatacagccgtcgtccattttcagttaagcttgccggcttcaacaaatccgcctgatcgtagtattgcaccgtccgcaccgaaacattacataatttagcgagttcacctgttgtatattgcgccatagaatatcacctccataccttgatactagccgatgacgtaacgtcacaagcaagtaaaaaagcattatttgctaaaacttttattcgttctcctttaatgcaccaatcatatcaatcccttttaacttgcgatgggtcatccccatcacaatcagtgaaaatagcaccgtcatccctgccgcaatcaggtagccgctagctggaatgatgagtggaaaggccacttgttctgacgaggccatcgtgatgatgaaccaagtcagcaatttaccgattccaaagccaagcacaatcccaataacggtgaagattacattttctcgcacaatataggccgtcacttctttgtcgaaaaagcccaggactttaatcgttgccaattcacgttcccgctctgaaacgttgatgctagtaaggttgaataagacgacaaacgctaaaaccgctgataacccgatgaaaataaaaacgattgggtctaaattagcactagccgttgcttgcttagccccttgatcactgataaacgttgtggccgccacttccgttgtttgttgcaaacgggtcgccaactgtttttcttgcttggtagtcatcttagcggtgcgcacgagataggcattagccgcaactggttgttgtagcgtttttgaaagagcagattggcggagatagacactattaccgagataattttcactgatccctgcaacttgaatgcgagcacgtttcccctgtgccgtttgtagcgttaaccaatcgcctttttgaacagcatatgttttagcgaggttcgcagcaataatcgcaccgtgtttcggcaatgtgagtcgttgttgttctcgcggtgtttgcaaagcgacgtactgtgcaagttttgcttgatcagcgaccgcacagactgtcgccgcttgatccgtaatccctttttgcttgaacttaacctgggtcattgtgaccggtaagtaagaccgaaccttctcagtctgtgttaaaatcgacttcgtttgggctgtactattcggtattttaagcgtcacaattgcttggtaatgggtcaattgcttaaactgacggtcagcaacttcgccaattgacgtctttaaaccaaagcctgcaaccattaaaccggtacacccagcgatgcctaagatggtcagaatcatccgtgctttatagcgaaaaagattacgataagttactttttgatggaaactcaatcgccgccagagcggtgtgattctttctaaccaaatccgttggcctggtttcggcgcttttggtcggagtaattgggtgggcttctcgcgtaaatcgcggattaaaacataccccgtggccccaactgtcgcaatcaagaccgctccagtggctaataaaattggaactgtccaaaaatgggttggataatgcgcaaaggtgtagaccggtttttggattcgatagacgactagcggtaataacttcgtgcccaaaatggtgccaagcacggtgccgatactacctgttagtagcgcatatagtaaatacttctgcgcaatttcccaattacgatagcctagtgccttcaatgtcccgatttccttacgattttcttcgatcatccgcgtaatggttgtaaaggtaattagaatcccgattaagaaaaagaagaccggaaagacattccctatcgcatcgatgcgatccgacaagctcgtaaattcattaaaacccggattagcactgcgcgcagttagtaagtactgttgctgcggctgagttgtgtgtgcttttaattggcgcatgagctgtgtttctttagtcgcaatgccggtgcgataagcctgtaaaaagctactgtgacgatccaaatcactaaagcgcaccatcatcaccgaatacggttgaggtgcaaatgccttttgtggcaaatacataaagccatctagctgaccatccccgaccggtacggttccacgttcctgacggtcgatatatagcggtgagtccacataaccgaccactttaaaccggtgcgtcaatagctgctgactcttaaccgtcaccctctgccccagacgataatacgtcttgaccgcgttatccactaaaatttcattcgttcgttgcggatagcgcccggtagtcagcgttaagcgattttgccgtgcagttggttggtaattatataattgtaagttaacatcccgcgcttcatcgcgatacggaatccgataacccaattcagcttggacaccatgcattttttcgaccaccgcacggtcctgttccgttaagccagcggtcccactaatctgtaaatcggatacgcgttgcgtggtgacaaaatgatccacagtctcttctaagttcgggccaatcgatttaatccccacaaacaataagacacccattaaaataatcaggataatcgcaatgaaccgtccaatcgcctgccgaatatcgcggaatgtggtttgtaaatataaacgtgtctgcatattaaccacctaccattcaatcttttcaactggaagtgggttgggattcacttcaattgaacgcacgcgcgcatcgttaatgtaaatcacgcgatcagccatctgggcaatcgcggcattgtgcgtaatcaaaacaacggtccggtgttgttgccgactaacttcttgtaataatttaagaatctgcttacccgtttcataatcgagtgcgccagttggttcatcacacaagaggagcttcggattcttagcaagtgcccgcgcaatcgccacccgttgttgctccccaccggatagttgggccggaaaattctgaagccgatcctgcagaccaacttgttgcaaaacaagcgcaacatctaaggcattcggcgagacagccgttgccagcgccacattttcttgcgtcgttaaattcggcactaaattgtaaaattggaacacaaacccgacatcagtccggcgaaacgccgtcaattggtgcgcactaaactgcgcaatatcgacaccatcaatcaacacttgcccttcatcgggtgtatccatcccacctaagatgttcagcactgtcgattttcccgcaccactcggtccgagaatcaccgctaactccccttcattgactgtaaaactaatatcatgattggccacgattgttgtctcgcccatctgataccgcttggctacatgtcgtacatcaattaaactcataacgatcactcctatacctatttaaccggttacatttgactagttttattatcgcatatccgagcttgcacgacacaaaaaaaagacaatcagaaaactgattgtcctttaagataagtaccattttttcttaattcaacgtaaagccctgttttttcaaaaaactcgccactgctggtcgtcgcacttcactaaagaaggccgtattcttggtcgaccaatcagtttgttgctgattggtcccacgattagcataataattttgcatttgttgatcgtattgcactaggttggttgcctgatgcacatcatattgattttgagcgacttgattaacttgcggcaatcgtggtttaacctgatttttagtcttcggaatcccgaccgttaacccaaatagtgggacggtataggcgggcaactcgagtagttcagcgacacgcgcaatgtcattgcgaatcccaccgatataacagatgcctaagtctaacgattcggcagcgactgccatgtcctctgctgcaatggctgtgtcgactgttgcgactaataaggcttccatattttgaatgccagctactgactggcccgctttttctaagagtgtggcttgtcggtataagtccgcgacaaaaacatagaacgtccccgtctgtttaacatacgccgcactttgagaaatcgttgcgatttcatcacgaattacgggatcggtcacttcaatgattgaaaatgcctgaacgaaattcgaagaagacccactttgagctgccgcaatgagttgttgtttcactgtcgtgctgaggggtgttggctcgaaatcacgaactgaaacatggtgttgcatttgttcgattaaagatgacatacaaagactccattcgatttaaaataagttgcttctagcatagcgcgttaacacaaaaagggctagcgcaaaattgccctagcccaaaaacgtgctttttgaaactggctcctgtgcttaactacaaaataagcactatggcaaggaccgccatagtgcttatttttaggttaatgctcagaaccaaaccgtttcaaacgcactttgtttgaaacgtgctttttggttgcaacaacttccgcttaagctaaaatccgcagtactcctaaaacctggattactgcggattttagcttaatgctcagttgctaaccgcaaccaaacgcactctttaccagtggatttcgttaaaaatctttggtcctttgcgcatctttgtccgatcatttttagcaacgtcggtctgttttgatctgccgccaccttttttctgatcaattagtgcttgcattttttctttttgcgttaattttggtgtttgtttttcactcatcttctgactcctaacttttctacattctataagattagcatagaattcaaagaatgcctaaccgttattttgtagggtcggaatcaagcgcttcgtcacttctcgtacagaaaacgggttttgccccgtaatcaactgaccatcctggacagcaaatggtttgtaaaaccgtttttgcacaaattgcgcgccgttttgggttgccacttcttgatttaaaaatggcaccacttttttcttgcccgcaataatttcttctgcagtggtaaacccagtcacttttttaccagcaatcagatactgcccgtcatcatttttaatgcgtagtaaacccgcgatcccgtgacaaacggacgcaagatagccaccgtgattataaatttcccgggcaattgtttgtaattctggattatcaggaaaatcccacatcacaccatggccgcccgtatagtaaatcgcagcgtaatcagctggattgatatcgcttggcttcagcgttgcgactaacccccgttgcacgtaatccggttgttcatagatggtcagaattgattcatccgtgtacttcatcccccgtggatcaagcgggacgaagccgcctttaggactgacaaaatcgtaatcaatccccgctttttgcaattcatcaacgaactctgcggattcccccagccataatccggttggatcggtggttccttgataacgcgtaacattcgtgtggacaattagtactttgggcatctggttagcctcctaaaaattagtgatgtgggtttattaaatcatttcgttcttattctgtcaattgaaaaataactacttacgccgtaacaatccaaatagcgttctgaattgatttttaaatgaaacaacatcattgaagatgtcctcgccgtcgttcaacatcttgaccgttaaccagccgagcgcttcggtaatcgacatcgcaacggtcgcattgaccgcggatccggtgaccgttccaacgaccggtaccagttttagaatgttaccgactgcactccgacctaggccaacgagtaccaattctttcgacaggctcttacccaaactagccgaccaagattgaccgaatagtttatgcaaacgcgccatcatcgttaattgaaccggcaccaacaagaacgcatcggaaaatggaattggtgaacagccaataatcgctgctgttagtgatgctgcgtgaatgatattgtgtgcctttttacgcatctgatcatccacaccgactaggaagtcttcaaagaccccatcaaactgtgtccgactcttcgccatcgtcttttccgccaatgctttggactggttaaaagacttcgcaatcacagctgccgattgttgcggcaacttctttaagacttccgcaaagaaggaatcaaattccggatttggttcaccattcacttgttgcttattaaaaggtttcttcatcatgccacgctccttatctgattgactaacatcgctactttaaagcgattatataatattgaacaatggttagtctatcgagcgaaaggctgactttttaaagaatctcctgaaccccttcttcaatcgtcgtcaccttaaattctgggaaccgtttcttaaacttgtctgaactgaacagattatctacttcatatctaggtaggagttcttttaattcctttagcggtttgctgaaccagctaccgatgttgaactgccacatttttaaaacggtgtagtcgattggttgatgcgttaaggtgcctgctagcgcgatgatttcggcgtatgttttaccgtcatcacaagggaggtgccacgtttgaccaaacgcatccagcgtattgccaatcaacgccatcgcacgactagcatctggcgtccaaattaatgtccgaaccgcttgatcattcaatggcacgcgcacctttttgcccgccttgatattgttaaagaccattgtgttcgtaatgctttgcgtcttgcctgggccataaaattcaggtgcacgacaaatgaccgcttcaattgcgccagttgccatcttatcaagtaacaactgtgcgatctccgctcggacaaccgctttgcggccaacgggttcaaaaggactcgcttctgtctggagcgtgctatttttcgcatacatataggtattatcgaaaaagacgagcttggccttgtgcgcgacgcacgcgttaatcacgttagtcatcataatgtgaaattgcgcttcccacatgtctgaattcatcggtaagccagcggtaaaataaacaatttcactgcctgcaaccgtacgatcagtttgggcggcgtcgagcaagtttgctggaaatagttgatcgttcgcgttcacttttttggattccgactgaccagtcgaatgtccgttgtgaagtccttatgaagtgccttggctaactcttggccaatctgaccgctactacctaagatggtttgcattttaaaaactccttttactgttgtttttcgatgactgccgtaatctgatccagcagtgtttttagttgattgatttcgcccagttcgtgttgcaagtaataatagttcttcgtgccttcgcgtctaaagtcgaccaagttggcttccttcaacactttcaaatgatgcgacactgccgggcgcgacaagtccgacgccgccattaaatccgtgacctgtaagccatcacaagctttatcagccatcaattctaaaataatactctgccgcttctcatccccaagcgccgtcaaaaacgggctcagctcagcaaagctctgtttaataaccttcatttcatccatacattaatctccggttttattttaatggttcataagtttaaaccattaaaccattgatatgaatttttgtcaacaacttcaaatcaatgcaacaaaaaaagcctcactcattagctgaaaaatataatggtttctcaagtcggtatgtcacacaagcattcactaagttcgctaaggctgtcattgaccgttatggtggacaagtcaaatattggctaagctttaatgaacaaaatggttttttctttgaacctggctttgataatactggctttatcaacggagagcgcgacttattaaccctttatacgatcgctaataatacaatggttgcgcatgctgaaatcgccaattacttacacgcccactaccctaatgaccaaattggtgggatgttagcctatcaagaattctatcctgcaaccagtcacccccaagatgtctttgctgctagaaaagcatcagaatttatcaaccaacatttcgtcgacgcctttacaaaaggtcactattcagccgaagtactgcaatatatgcaaaatcatgacttaatgagtagcattcagccaaacgatttggcgttaatcgcgagtcaccataatgacttcttagcgttcagttactactacactgtcgcactcgatcacacaaaattaacccccaacacaccacccaattattacatgcgcgatgcgagtgtccctaatccttatttagaaagtagcgaatggggctggcagattgacgccctcggttttagaaatgtcttaacgaaactttcaaatgaaactgccctccccatttttccaatcgaaaacgggattggcattcgcgaagaatcactgaatcacgaagtgatccaagatgacgaacggattgcctatcaccgcgaccatatccaggctttgaaagacgcagttgatgaagacggcgctcacgttatgggctatcttggttgggggttaatcgacattccaagttcaaaaggtgatatgaataaacgctatggcgtcgtttatgtcaatcgaaccaatcacgacctcaaagacctttctagaattccgaaggctagtttttattggctgcaaaaggtcattcaatctaacggtgaacaattagactaaaaaaagtgcgttaaaaggagtgttttctatgcttaaacaaggaagtcggcgacaaagatttattgatcagtttacaaatatcgcctttaaaatcgggaatcaagtgcatttgcgttcattacgtgatgccttcgcgattattatgccactattcatcctcgccggaattggggtgctcgtgaataacgttgtattcccctgggtcctccacggccaaatgctaaccaactttcaatacttcggcacttacattaccaatgggactttgaacgttgctgggctattactcacacctacaatcggctactgtttagcgcgtaataagaattacgtcaacaaaatttccgcggctgtcatggcactagggactttaatcatcatgatgcctaatactgttccggtcacaccactagctgccaaaaaagccgtcgaagtttctggcctcttaactttccaaaacgtgggaacaaccggaatgtttgccggcattattattggtttagtcgcaacagaactctttatgactctttcaaagcttaaaaaattacagattaacttgagtgatgccgtcccatcagctgttgctggttccttcaacacaatgattccagacctcattacaatgagtctttttgcggcacttgctgcgattttaacggctggtttccacactgatctcatcactttaattacaaatgtgattcaagaaccacttcggcgcgttaatacaagtttaccgggtctccttttgatttacgggactggtaatctcctcttctcatttgggatccatcaagctgtcattaacggtactttattggatccagtcttactgatcaacatgaacaaaaatatggcagcttacgcagctggtcaacacatcccttatatcatcaacaacgttttccgcgatacatttgggatgcttggtggtaccggtagtactatttgtttattgattgcgaccttgctcttctcaaaatcacgcgctagtcgtgatattacaaagctatcattcgtcccaagtttatttaacattaacgaacctgttattttcggttatccaattgtcttcaactttgcgctcatcattccatttgtcctaatgccaggacttggcatcagtattgcctacttcttcaccgcaattggctggatgaatcgagtagtcgtcatggtaccttggaccacaccaccattactcaactcctatttagcaaccggcggcgattggcgcgcccctgtgattcaaggcttcactttaatccttggcgttctaatctactggccattcctgaagattagtgaacgcgttgcggccaaacaagctgaattaacgcaataattaaaaaagaattcggaattttcgttagaaaattttgaattcttttttgttttaccgatgactctaacctacccctagtcttataaatccggattaggcgtaatcacttgcaacttatgttctaagagtcgcatctccaatggtgacttggcactcggatcaccatcaatgcgggtttgtgcactttgctgattgtcgactgtgatgctgatttcattcgctttaaagtaagtcatcccgggaatctttttaaaattacccgttaagaaataagggagaaacatcactgaccgtgctagcgacattttcggcgcaacgaagacatggaaataaccatcatcgggttgcgcttcgggattgaagttggtaaatccaccaacggaattcgtgagggtcaccagcaagaattgcgtgtctttttgccagtgccgatcaggcgtttcaatcgttagcggataatgctgatgctccgctaatgcatggatgcctttgcttaaaaaagctagcggcccccatttttgtttttcactctgagtcacgttcaacgcggcgtccgccaaaatgcccaatgtcattgtactaatcaagtaatcatcgttcacttggccgacgtcgagtgggcgcagatgaacctgctgcagattttcaatcgcttgatcaatgtccaacgggatttgtaacatccgcgccaaattattcacggtcccagcaggtacaatgcctaaataaggcggctgatctaacgtcgcaagaccactaacgacttcattaatggtcccatccccgccgacagcgaccaccacatcaaagcctgcccgcgccgcttttttagctaaccgcgttgcatctttcggcccttccgtcggcatcagttcgaccttgtgttgattcttgatgagtgcctgctcaattttctgaccaaccgactcaccattgttgtgcccagagtggggattataaataacggcataacgatacataaaaaagcctccttcaattactctaagcatagcaaaaatattgggaataggctgggatggcgcattaggcttacacttaaaaattccgatggtgtcaaaaacaaaaaaacaccccgcaatataaaattgcgaggtgcttgtaaacattgatataaaagtgatattaacgtttactgaattgtgaagctttacgagctttcttaagaccgtactttacgttcctcggttttatacggtttcaccgagtttcaaagtccctttatatcaacgtttctattcactcacttttatggaatttcaacgagttttgagcgtgacgccctaatttggtacaaaatgggcatttcgtaaagctacgattaacgcaaagcaaacgcacaaatgaacgtaaagcaggttgtaaccagacctgctttttttgtcctcaaaattcgttttaatcaagaacaaatcactaaatatggaggaaattacattgatgaaagcagctcggcgaacctcaattttcgccgcattgattatgctattcgtccaactctttgtccccgcctcaatcgctctcgccgccagtatgaccaacaccaaggtcgctgactggcgaaatacttggcacctgcatctgttcaatggcttacattggacggacaccggtatgtggatgaaaaaggtggacggcaaagttgccttctgtgtggagcacggggtcgatctcgatatgagcggctctggctacaaccccagcgcctactccgacgctaagaaggatcaactagccaagatcgcttactacggctactaccaaaaaccaaccaatcgcaactacgccgtgacccagatgattatttgggaaacgctcggcgattcgttgctcaccacaccaaacaagacctatcagtctgaaaagaaagcgattctcgataaggtcgccgcgcatgatcgtaagccgtctttcaacggcaaacagatcacgctcgccgttggtgattcaatcacgttgactgacaccaacggacggctcgcagctttcgcccagcaaacggcaaacaccgcgaacctcaagatcaccaagtccggcaacaagctcacgctgacggctactgcccagtcgaaggaatccggcaaggtggcttacgcgattgcaaaggccgctgacgttggtacttctttcgtctacacgaaaggctcacaacaaaaactcgtcaacttcaagctctccaacaacggtgagtttagcctgccaatcaaggtcaacttgaacggtaacgtgaaggccaagaaggttgacgccgacaccaacaaggcgctaccgggtgctaagctcaagtttgaatacgctggcaccacaaaggaagtcacaactggcactgacggctatgctgctctgaatgggatcaaagctggtaccaagatcaagatcagcgaagtcactgcccctaacggctacgtcaacaagggtgaactcaaggaagtcaccatcgaacccggcaagaccgttgaagttgtcctcggcaacaaggaacagctcggtaacgtgaccctcgccaagattgggcgtgagttcggtagcgacatgttcaatgcctactactcgcttaatggtgctgtctacggcatttacacaagcaccggcacacgggttggcgcaatcaccactgacggtaacggcagaggcaccttgcagaatctcaagcttggtagctactacgcgctggaagaaaaagctcctgctggctacgttctgaatacagccaagctgccgtttgaattgaagtatgctggtcaaactgtcgcggtcactactgctcacgtcgatacgactgatcaagaacaacgcggcaccgccaccatcgaaaaagttgacaccgttacgggtaagcagccacaaggcgctgccagccttaaccgcgctgtctacgaactccaccgtgcagccgatgacaagctcgtgaagtcggtgacgattgccaacaacatcgcttctgtttccggtttggaactggacgattactactggcaagaagtgaaggcaccgactggctacgtgcttgatccgcaaaagcatcccttcaagctggcatacgctgggcagaacgtgaccactaccgccgctaccacgacggtcaaggaacaagtcatcactggcgacctcgacttgctcaagtacggtaactacgactgggcaactcaaggcaaaggcactaagccagtcatgctaaagggcacccagttcactgtcaccagcaagaccactggcaaggttgttcgcactggcctcaccgatgcacagggttacgtgaagttcgcggatttgccttacgacacctacaccgtcactgaaaccaagactccaaccggctataacggcatcaagccgttcacagtcacggttgacggtacccaaaagtcccagcattacagcatcgaaaacaaggttatcgaagaaaagctgcgtgttgttaaggtcgataccgaaaccggtaagcccgtgctgcgcactggcgcgattttccggatcaagaacttgcaaaccaacaagtacgaagtccagccaactgccgacaagactggtacaactgacaagtttgctactgacaactccggcgagctgatcaccgccgaagcgcttggctacggcaagtaccagctcgaagaagtccaagccccagaaagctatgtactggctaaggaaccagccaagttcaccatcgacggtagccataaggacggcatcgtggtcatcaagttcgctgacctctcccaaaagggtgtcgccaccttgaccaagaccggggctaccccagtcgccgtcgaaaaggttgaaactgaatacggcgatcagtacaagtttaagtacgattacaccgccctcgctggtgcgaagttcgagttcaaagcagccgaagatattacgactgctgacggcaccgttcgtgcccacaagggtgacgtggttgctactggcaccactgacgctcaaggccaaatccagaccccagagctgtacctcggcaagtacactgccactgaattgtctgcgccaaatggtttcatcatgaaccctgagccgatcgcttttgaactcaagtatgccgggcaagaagtgacggtgacctccacctcacttgaagccaagaacgactttcaacaactcgacatcacgctcaacaagcaagaagaaagcatcgccggttggaaagacaacctcccagaaatcaagaacgtcgctgccaatggtcaggtcttcggcttgttcactcaaggcgaaaccacgatcggcgacactgtgattccttctgaatcactcgttgccaccacgacggtcaaagacggtaaggctgaatttggtgcgatccagttgccagaaggctactactatgtcaaggaacttgacgccggtgagaagcacgacttgaacaccaccatgtacggcttccatttccacaccaccgacaacgagaagatcaaacacatcgacctcaatgacggtaaggtgatcgacaacaagctccacgaaaacgaactgtcattcaagaagatcaatgaagttgccacgctggtttcgggtaagggctactcctacgcgatgaccggtaacgctgctggtgcgatttttgaactgcttgacgctgacaaaaaggtcattcagaccatcaccgtttgcaaggattccactggctccatcaagcacttgcctgtgggcaccttctatctccgtgaatccaagccttctgctactaaccttgttctttataaggaaaccctcaagctcgtatctaccaaggacggcgtgacagtgtttaataacaaagacaagcagatcggcgagaccaaatctgacgccaaggaacccgcgattgcctttgaactgaccaacgacttgatcaaaggcacaggcgaactgaccaagaccgacgtttctactgggaagcggctgccaaacaccggcatccgcattctggacgaaaacggcaagacggtcgtatctggtcgcaccgacaagaacgggggcttctccttcggcaatttgcctgctggcaagtacagcttccaagaatacgacgcaccaaagggctacgaaattagtgaagccctcgtgccattcgagatcactaaggatggcgaaatcgtgaaggccgtcatgaccgacaagcagacacctaagcctggcctcccacaaaccggtaacgcgacctccggctggctcatcgtcatcggtgtagtgctgctgctcggcgtcctcgctgcaatggttgtgatcggtggtgccaagaagaaagacggcaagtaacatgcgcatttcttctatcaatatgtaccctgatcccggtggcgacgtactgctccatggcgacatcgtactggatcatgtgctcatcttgaaaaacgtgaagctcatcgaaggtcagtatcgctggtatatccagtttccacgatacgctgatggtcgcacggttcacccaatttccaagtcgttttacgactacctacttcaacaactaaccgaatactatcaccaagccacagccgagtagccccactacccggctttttgaatacgaaaggaaggctacaacatggaacttaaatttgttgcaccaaatattgaaaagacgttcggccacctgtacttcggttcgctcaagcgcgaactgtcagaaggtgatcgcgacaatcgcaaggttgtctcccgcacttacgagttgttctccgacttgcagcgtaccgacaacatcgagatcaccattccagcgaagaaaggtgacaaggccgaaagcattgaagttgatgcaccagtcaccatcatcaagccgcgcattgcgaccgtcggctaccggatcggtgaacaagcctttgtgcgctacatctgcaatgccgacgatattgtcccagccaaataaaagaaaagaggaactcacatgcgattagcagaaggcatcgttatcgatcttgaagaaacctttggcgtcttgaaattctccggccagcgccgcgaacgcttcgtgcaagacgaagacggcaatcgtaccgacgacgtgaaggaacgcacctatgacttgaagtccatgaaacaaggaatgatgatccaagtttcaattccggcagaagctggggtcaaagactttaagtacaaccagattgttactttggttgacccagtgatcgacaccgtggcaaacgcgaacttcaaccgcgtcgaaacttcgtggtacatgaaggccaaggatctcgtgattgccaccgcaccggtcaagccacaggagaagccaagcaacaatgacaagaaatagctcattgccccactcctcacgcgcgccgcccgctgcggcggttgcttaccactcatgaaaggagttgaccatagatgatgacttccacattgaccgtagttggtcgtgaagtgttcatcgacgactataacgaagaaatcgacaacgactaccgccttgacccagacgagattctgcaagacatggtggaactcatggaagaaagccctgaatcttaccaacacctacatttcgacagtgaacagaccaacgacggcatgaataagctgttctcgttcacttcatacgaaggtgaagatggcttgcggctctcgtatctgggcgtcagcgatgaatgaaaggactgatgacatggcacaagcactaagcattgacggctttttggaggactatcccgaactagttgaccctgattaccacgaccccagccctgacgctttgatcgacatggtactgatggccgccgaacaggccaatcctgatgaaccattttccatttgggtagacggcgaatgtacccgcgatcatgaatccaaagagttcagtttcaatatcgacaccgaagaccgacaacccgctatcaaatatattggcgtcaagtaacgcccaaaggagaatttctatgaatgatcaagtaaccctcgtcaacctggacgactttcaatttcactacgaacacatcgctgactttgacaacggtgcatcacccactggtgacgtcatcatcaacttaatcgacgcagctaatcacgcgattcaagctggcatgaatgcttgtgacctgattttagccagcgagcagtgtgcgaaacccgaagcctaccttcaaggcgcgcgctttagtttcaacgtttcaagtagtccacttggtctcgtgattggctacgacggagtgaacattgacgaatgaaactcacgtatcgcggtacacgggtctatccccgtcaacgcaacttactctacaacacggcgatgacggttgtggtttgcttgtgggtaactggagctgccattgcctattggccgctgctaagacaaatcaactggaagttgtttagttggccggacgtggccgccttgccttggtcatggctaccgctgattattaacagtttatgcacagcgctactctttggcgctggcttgtggtcatatcgaacttggtttgcggattcctacaagcagatggaacaccgccaaaagctcgcccgcatgatcatggagaataaatggtaccaaactgaccaaaccaacagcgagagtttcttcaaggacttaggctcaacgcgcaccaaagagaagatctcgcactttcccaaaatctactaccggctcaaagacgggctgatccacgtttccgttgaaatcgtcatgtcttcctatcaagatcagctcctgcacttggaaaagaagctcgaagccggtctttactgtgagctggtagacaagatcttgcacgattcttatgtcgagtacaccttgctttacgacacgatcggcaagcgtatcaccattgctgacgtgacctgtgaacacggctccattcagctcatggaaactgtggcttggcactatgacgcactgcctcacatgttaatcgctggtggcactggtggtgggaagacctacttcattttgacgttgattgaagcacttctgaaagacggtgcccaactcaccattcttgacccgaaaaatgccgaccttgccgatctggcagacgtgatgccaggggtctactcgaagaaggaggccatgcttggtgcgcttgaaaccttctatcaggacatgatggcgcgcaacgacaaaatgaaacaaatggacgggtacaagaccggcgagaactacgcctatcttggactacccgcccactttctgatttttgatgaatatgtcgccttcatggatatgcttggccgcgatgctatgcaagtcatgtccaagctcaaacagattgtcatgcttggccgtcaagccggcttcttcctcgtgttggcttgccaacggcctgacgcaaaatatttaggcgacgggataagagatcagttcatgttccgcgttgcgcttgggcgcatgagtgagctgggctattccatgatgttcggcgaaaccaataaagacttctttcaaaaaccgatcaagggacgcggctatgtggacacttgcggcagcgtgatctctgaattttacacaccactagtgccgcgcggctatgatttcctcaccgaaattgttgccgtagccaataccgtacccgcaaccccaacagaacaggaggtatcaaatgagcactgatgtcaaaatcgaaaaccacgcgcaattcctcaacgactttcacgagaacttgcctttccaatccgacgaagacgcggaagaccaacttgaatggatggcaatgcacgcccacgagtacccagattcacggatctggatgggcgctcccggcggccttaccgctgatcgttttccgaagcgcttttggttcaacgtcactactggcgacgacggtggcttggtcatgacttacaccaatgtcgcagatgaaggcgatgaggagtagatctatggtaatccgatctcgttcaccagatctaatgcagcatcgcaggtggcttcataagtgacgttctcactgtatacgtaggccactcggtacttttcccagcgctgtttcaatagcacagacccacgcaatgttgcaatgatttctgagtatcgcggcaacagtgcttccgaaccacgaagatccgccgtcgcgtgcaatgcatcctttaagactttgaaatcaatattctgccgttgcaccttatcgaacagatacaagtcgtagaagtctttcatacgcgaattaagttcttgccgcacaaccatggattcgagtttctcggcaagaatggtctccatattgtaagccataactagaatatcttgatcattaaaaatcgtacgatgatgccatgaaatttcgcggggcgtgattgtgtcccccgttgaaacatcgatcttcgtatctacgacgctgttgtagatctttgcttcgatatgaatgcgaaacccagcgtattctgcggcgacacgaatatcgtcaatcttagcaattctgattgttacgtcgctgtctggctcgttcatatcagcgatgtccgtaaacactttgaggatttcctcttttgttaccggcaagcctttgatcgaggtatcaacgtcacgagttgcccgtgtatcaacacctagcattgacgcgattagaaacccgcctttgagaatcaagttatcccggtaaggcgaacgagaaatacgatctacaatctcgtctaacgccacctcttgcatcaatatttggggatcaatctgcttttccttggcaaggttacgcaccttggctttgaactgttgcccatttgaaaaacctagtttcacagtagtacctccatgtagttgttgattttttctctaactttgaacaaatctgcatagcgtaccagccgcccaatatctttttgctttagctgcgaatagctaatcattgcttgacgaatagtttccgaatctgatgaatcacgcgctcgtaaaatatcacagagggttcgctcaatattgtagacccgtaccttgtgctgacccggagacagcacttcctcaacgcctagctcatgccactttacattttgacgatagacccgcacaggaaactcgccgagtgaacttgcattatagccgcgaggaaaattcatttggtaacgatccggtgtcctgtcgatcatatgatgcaaaaagagcgcagtgtctttatagtagatacctttgttaaaacgatactgaaggatatacatgtcatcttcaaatatcgccgggtcaatatacaccccacgccctactcgttctagcttaccaaggtttgcaagatcaataagcagatgtggatcaattccaagttttctagcatccgcagtcgttacctgcccgttattttgcttcaagaaggattcaattaaatctgacattaagttcgcctcacgtttcaagcatcattataccatataacgatgcttgaaacgtgaaatcacaagtacgaaaggagaacccatgagaataccaattattaacaatcaaagtcgttttcaggaagactacgctgacacgattatagctggaaccccagaggacgcagaagacgccctgctggaaatgtgcgattacattgagccttacgaagacggcgatcactggctcgagctcgtcggtgatcgcactatttcgggcaagcccgtctacttctggttcacagctaacatgacgcaaactggcatgcagctcacctatcatagctgggcgcatcattactaatcggctacacgccgtcgtcaagacaaagcctttgaaaggagcaggactatgactaaccaatctgttcagcaaggctgcaccctgccgccacgcgcggcgtgcagcgcgaaagccgcaggcgtgagtggcagcggtcggctggcgccgaccgcttacccccagtactctaacaggggggtattaaatacaacgtctttgcctgagcacggggtagaaaggttgatatgacggcgtttcaatagaagaaggcaaaatgatggatggcacccccaatccatcattttttgaaaggagcgttgccatgtgctcatggcatgaaaaaactaaaaccaaacgcaagcaactcaagctgacccaagctcaagtcgcccggcgcttaggtgttacacggatgcattacgtccaagtggaaaacggaaagacgaaccctagctcatcgctgcaaatggaaatcgaccggctactcaagaactggaacgatgaaccagaactgacgctgatgtttgactacatgcgcgtgcggttcccgacacatgacgccaagactgtgatcaccaatattctcggtctgaccccagaacacctgatatttgaggaacatggcttctacggctattcggccatgtatatcttctctaacattcaggtcatggtggcaccagttggctccaacctcggcacattggttgagatgaaaggccaaggttgccgcgagtttgaaggcattctgctaagtcatggtgagaactggtacgactactttcttcgggttgatgaagctggcggcatcttcaagcgggtcgatattgcgattaacgacatggttggcctgctaagcattccggagctggtcgataagtgtctgaacaatgaatgcatttccgtcatgcgatcgttccaagggctgcaatcaggcaagctcgtggatctcgacgaagctggccgaggcaatacgctttacgtcggcacgatgaaaagtgacgtgtatttctgcatctacgaaaaggctgccgaacaagctgccaaacgtagtatctcgattgccgacaccccgatcatcaaccggtttgaaattcgtttgaaaaacgagcgcgcaatcaaggcgattgagaacatgctgataacccgtgacgccgaaaaggtcgccttcggtattatcacccgctacatgcgctttgttgatgaagtcccggacaaaagccgtctcaagtggccgctcaacgaacgttgggcatacttccttggcaaaggtcgccaaccgatccgcctgactactgacccacaaccctttgacctgaacaaaaccaaggcatggctccaaaagcaagtcatgcccacactcaaggtcatcaaggaaatcgacaactacttcggcaccactgacttacagctcatgatcaaggacgccgaactgaccgataaacacctcaagctaattgagcaacagactgttggtagcgaggagctaggaggtgacatgtttggtcaatgatgtgcttgcttcccacccgctgcgcggcaaggcattcacagactgtgtactgaacgtatacgtctacaaggctgcactagtcggcgtggtcgaacacaagaagtaccggcgcatttgcgacatgaacagtttgggcttcacggcacaagactacattgcttggcggcaccagcaacaagaacacccggcggcattgattggccgtgatggtcgcgctttgaactacggtgaactgcgccgactgctttatcaaacagccgaagaatcaggctggccggtcttcgctgcaccagtggaagacctatttttcgattaacaaacttggtcgctattgaccgcgccaaaacaatcgcaattcataaaggagcgatggccacaaattcaactaaaggagtatcaacgcaatcgaactagacgtcatctacaatcgcgattgtctggaaggtatggcggacttaccgacagcctctatcgacatgatcctgtgcgacttgccgtatggtaccacagcaaacgcttgggacaaggtgattccgttttcccacctctgggggtcaatacgaacggctcatcaaaccccaaggcgcgattgtgctaaccgcaactgaacggttctctgcggacttagtgcaatcaaacccggccttgtatcgctacaagtgggtttggatcaagaatactgtcaccaacttcgtcaatgccaagaaccgccccttatcccgtttcgaggagattctcgtcttctccaagtcgggtacggccaactttggtaactcccccgataccaaaggcatgaactacttcccccaagcactgctcccctataacaaaaccgtcaactcacgtaaatacgagaactcaaatcagctgcacccgtggaacgctcccgatagctacacacaagaatggacgaactatccgtctgacgtgctcaactacaagtctgatcgcaccggctggcacccgacgcaaaagcctgtcgatctttttgcctacctcatcaagacttacactcaacccggcgagatcgtgctggataactgcatggggtctggtaccactgcgattgccgcaatggacactgaccgtcatttcatcggttatgaaattagtgaagaatactggtggcgtgcccttgatcgcatcaagcaccaccacgcaactcaaactgaacttttctgatccgttacccatgatccggtcgctgctgaccgcgccaaaacagcagcaattttgaaaggagccctggtcacaaaactaaaaatcaaaggatgattattatgaatttcggacaaaacttgtttaactggttcacctccaacgcccagagcttggtgctgatggcgattgccattatcggggtctacctcggcttcaagcgcgagttttccaagctgatcggcttcttagtcattgcgatcattgccgtcgggttggtgttcaacaccgccggggtcaaagacgtactgctgaatctattcaaccgcgtcatgggggcttagcctatggacgacatcaaagtctttattgccaatcttggcaagtataacgagggcgagattgtcggcgcatggttcacgccgccaatcaacaacgaagaactcgctgaaaagctaggactgaacgaccagtacgaagaatacatggttcaggactacgaaggccccattgtctttagtgagtattcaacgattggtgagatcaatgaagctgccgcagccgttgaagcattgaaaggcaccgagatttaccctgccatcaaagagcttatcggcgaatggtacgacaacgtgattgaactcgcggcgcacaaggacgacatcgcctgctatcacgtcgcgaacatggcggagttggccgaagaactggctgacgaaggctggttcggcgacattccgccacaagtcgaaaactatatcgactatgccaaggtcggacgtgacctcgaaattgaaggaggtttcgttgaaacaccttacggcatctaccaattattagactaactctctgggctggcgctgcaaaaggcgccagcctttttatctcactacgaaaggagatcacatgaagaaagtcagatcctacaccagcatctggtcagtggaaaaggtgctgtatgccatcaatgacctgcaactaccgttcccaattacttttacgcaaatgacgtggttcatcgtcagcttatttgcagtcatgcttctgggcgacttgccaccactatcattcattgacggcgtgtttctcaagtacgtcggcattccggctgggctaacgtggttcatgagccagaagaccttcgacaacaagaagccaatgggattcttgcggtcggtgatcaactacgccattaccccgaagctcacctatgctggtaaacctgtgaagtcgcagaaagagaaacaaattgctgctgtgacctacgtttggaggtaccacaatgaaatttccaattaaatatattgaggacaatttggtctggaacacagacaacgagtgctttgcctattttgaattgattccgtacaactactcgtttctaagccctgaacagaaacaacaagtccatgagaactttcgtcagttgatctcgcagaatcgcgacggcaagctccatttattgcagctcgccaccgaagccagtgtgtgggacactctcgaccgctcgaagaagttggtcaaggggtcgctgaaagacatcgccttccagcacatcgacggccaagccgaagcattgactgaaaatgtcggtgacaaccaagtggactaccgcttcttcatcggctttaagctgttgctgaacgacgcagaggttaccgccaagtctatcttcaaggatatgtctttaggcattcgggacttcttctccgagttcaacacaacgttcgctggtgatttcttcaccatgaacaacgcggaggtagaacgctacgccaagtccgcaaagtttctcgccgaaaagattggtcgccggttcaaagttcgtccgctcgataagaacgacttcggctacttgctggagcacttatacggcatgacgggtcaagactacgatgactatgactatcacttgccccgcaagaagtccaagcgcgacacgattatcaagggctatgacctgatcaagccaacccgctcactgattgagcagcaccaacgctcgatcaagatcacccacgggctggatagcagttacgtgacgtacctgacgctttccgacattgttggtgaattggagtttcccggcagtgaaatcttttatttccaacaaagccagttcgattttccaatcgacaccagcctgaacgttgagattgtgaccaacaaaaaggcgctgaccaaggtgcgtaacaaaaagaaggagttgaaagacctcgacgaacacgcttatcaatccggcaatgaaatgacgcgtggggtcagcgacgcgttggattcagtcgatgagcttgaaagcaatcttgatcagactaaggacgccatgtacaagatcagctatgtcattcgcgtagctgggcggagtgaagacgaaatgaagcgccgcgctgatcagctactcgacttctacgacagcctcaacatcaagctcgtgcggccattcggcgacatgctggggcttcacagcgagtttatccccgcttcaaagcgctatatcaacgactatatccagtatgtgaccagcgatttcatcgcctcactaggctttggtgcgacgcaatcgctcggtgaaaaagaaggtatctacatcggatataacgtagacactggacgcaacgtctacttgcaaccagacattgccgcgcaaggcatcaaaggcaccgtcaccaacgccttatccgccgccttccttggtagcttgggtggtggaaagtccttctccaacaacttgcttgtatactacgccgtactttacggcgcacaggcactgattcttgatccgaagtcggaacgtactggctgggcagagaacctcgactttatggaagatcaaatcaacatcgtcaacctgaccagtgaagaacaaaaccgtgggctgcttgatccttatatcatcttgtccaacttgaaagattcagaatcgctggccgtcgataccctgaccttcctcacggggatctcaagccgtgacgccgaccgctttccgacgctgcgcaaagcgattcgcgcggtaacgcaagctcctgaaccgggactgttgaaagtcattgatgaacttcgccgcgaagacacgccgatcgcacgtaacattgccgatcatatcgaatccttcacggactatgactttgcggcattgctgttctctgacgggacggcgcggcggacaatcgcccttgaccgcaagatcaacatcgtgcagatcgcagacttggtgcttccagacgccgacaagacgcaggaagaatatatcactgctgaaatgctgtccgtcgccatgctcatgattatcagcacgttcgcgatcgacttcattcaccaaaaccgcgcccagttcaaaatcgtggacttggacgaagcctgggcgttcctcaatgttgcgcaaggcaaagccttgtcgatgaagttaattcgtgaaggccgctccatgaatgccggggtctacctcgtcactcaaaatgcagacgacttgctcgatgaaaagatgaagaacaacatcgcccagaagttcgccttccgcagtaccgacatcacggaaatcaagaacaccttgaacttctttggcctcgacgccgaagacgaaggtaatcaaaaccggctccggtcactagataatggggagtgcttgttccaagacatctgggggcacgtcggcgtgctgcactttgactatatctttgaacacctacaccacgcctttgacactcggccaccgaaacccgtggaggtgatcgctgatgacgaaagctaaccgtcggcggcttctgctgttcctcggtgttgtcgcggcatttatgttgatgctggtgcttgctggtggtcagccggtacacgcagcggggttggtagacgatcagtctggtggctctaacgagtattccaagtacccgttgtcacactatcagctcgactacttcgtcgatacgtcttgggactggttgccttggaattggggcgatggtatcggcaagtctgttagctatggcctgtacgctatcaccaacttcttgtggacactttctgtctacctctcaaacgctgcgggctacctgattcagcaagcctactcgctggacttcatcaaagatacgtctgacgcgattgggaagaacatgcagctcttggctggggtgtcaaaagatggcttcaccactgacggcttttacccgggcttgctcctgatgatcacactcgtcgtcggtatctacgtggcctacactggcatcatcaagcgtgaaacctcgaaagccatttcggcgatcgtcaacttcgtggtgatcttcatcacgtcagccagctttatcgcttatgccccagattacgtcagcaaaatcaacgagttcagtagcgacatcagcgccagcgcgctcaacactggctccaagatgattatgggcactgataccgcaacagataaatcaggtgtcgatgcgatccgtgacaccctgtttgaaattcaggtgaagcagccgtggacgcttttacagtttggcgacagtgacgctgataccgttggcaaagaccgcgtaaacacgttaatgaaaaccgacccgtttggcgacaaaggcaaaacccgtactgacgtggtcaaggctgaaattgaagacaacgataacgagaatctctcgccaactatgacgatcaatcgccttggtaccacgacctttgttgtcctgttcaacattgcgatcaccttgtttgtcttcttcctgacggcaatgatgctgttcagccagatcctcttcatcatctacgcgacgttcttaccggtgtcgttcttactcgctatgctgccgtcatttaacggattgatgaagcagaacattatgaagctttttaacaccatcatgacacgagttggcgtgacgctggtgattacgatggctttctcgctatcggcaatggtctatgggttgtcggctacctcgccattcttcctcgtggccttcctgcaagttaccatcttcgccggtatctggatgaagctcggcgacctaatgggcatgatgcatctccacagctctgacgcccagcaaggcgcacaacgcttctcgcgtcgtgggaaccgcatgctacgacagttcgtcggtagtgccatgggtggcgcaatggccggacgcttcttgtcgcggggctatggcaagaggcgcggaatgccgcaaacaccacagctccccgctggtacgcaacgcgagcaaactgcggacgctgccaagccacaacaaaccaagaagccacgcagccaacgtctgggtgagaaatttgccgatgtatctgatgtcggcaacaagctcaaggacaagactaaacgcggccttgatcaggtgaaggacgcaccaaccaacgttttatatggtctgcatcgtggtaagcaactgaccaaggaggccgccgaaactgcaaaagatagcttcaagggtcggcgtgaggctaatcagcaggaacgtgacaaacagcttgagcagcggcgtaagcaaatgcaagaacgcaagctggcgatcaagcctaaagctgatcctgaaaagccaaaaccaacggctaccaagccgccggttgaaccaactcgtaagccaacaactgccacacctaccaaaccaaagcctgaacaaactgataccagtggacaacctaagcgtgctgccacgaagccaacttcaactcggcctccacgtccagtcacgaaaccgcaagcagaacccaccatcaaaccgcaccaagaacctactccgccaatgaataaaaccaagaaactcctgaccctcgtttccgaaaaaccagccaagccacgaaacccaaccaagccacgaaacccaaagccgcagcggattcaaaaggctaaggggcataagaagcgatgaagctctggcactggttagctctcgccgcactcccaatactgttgatgggcggtctgttttttgcagtcatcgcctctgatgatgacgaagatcagcctgcctctgcggtcacagccgacgcgatgaacttatccgctgaagtctacaagcacaagctgatggtcgaaaagtattgcaaggagttcggtatttcggaccaagtgatggtaattcttgccatcatgcaggttgaatcaggtggcaagggtggcgacgtgatgcaagctagtgaatcgatgggcctaccggtcaatacgctagataccgaatcatccatcaagcaaggcgtgaaatatttcgcttcgctgttaaaaagcatgaaagctgcgggcgtggatctaaacaccgcgattcaaagctacaactatggtggcggctttattgactacgttgctaggcacgggaaaaagtacacgcttgagctggcaacatcttttgctaaagaaaagtctggtggtaagaaattcacctacaccaacgcggttgccaaggacggttggcgctatgcctatgggaacatgtactacgtgtcggtcatctcgcaataccttgtcactggtggcgctaaattcgacgacaacacggtgcaagccatcatggacgaagcgctcaagtaccaaggcactcgttatgtgttcggcggttcaacgccagcaacgggcttcgactgttctggattaactagttggtgttacggcaaagccgggatcaaactcccccgcaccgcacaagcacaatacgacgccacagcacacctgaacatcaaaggcgccaaacccggcgacctcgtgttcttccattccacctatgacaccgcagattacgtgacccacgttgggatctacgttgacggcatgaaaatgtataatgcgggcgacccgctgggctatgccgacttgaactcaaactattggcaatcccacctgatcggcgccgggcgtgtgaagaagtaggtgaagacgatggatcaaaacggtatcagctattttgactggatggatctcatcaccaacacctatgacgacgcgctgcaaaaggctcacgtcgatctcaaatttggtgacaatcgcgcgctaagaaacaaggaactcgacttcgcttccagcgaatgggaacgaatcaagttcttcaaacaaagaaagcccaacaccgacgacctgtgcaacgtgatcgaccgcttcgtggaccgtatgccagaaatggagtccggccaccgccgcgaatgccgactggctgtggcccatgaagttgcggttgagcactggctagttggcaaggtgtttgccccagaagatcgcaagtatatcctcgaccgcgaacgctacttggctgaagaatacttcaacaacgaccgtgagctcggtcagtatatcgaaaccgactatgagagctacaagcgcatctccctgcaacgcttgttcgtgcgttttcttgatatttacgatgacttttaccgctgctatgaaactagaaaggacaaggtgaacgaaccttgagtaaagacaaaacccaaaagaaaggctggttcaaaaagaagccagccgcgccaaattcactccaaattaagcaccgcggcttgcgccgtccggtcacgctgctttgttgggcggtgttgatcggtagcaccagcttcggcgtctacaagaacatgacctccattgacacccacacggtgcatgaagtccaagtgatcaagaccaaggtaattgatacacacgccttggcgaccttcactaccgacttcgccaagctctactactcgtggcagccaagccacgaaaccctcgaccagcggcagaaatccttacagccgtatctcgtggagcaactgcaatcgcttaacgcagatactgtgcggagcgatattcctacaaccgccacagttagtgaggtcaaggtctgggacgtgagcaagacggccaaagacacattccgcgtactatttacggtgaaacaagatctcaccaaaggtaaagacaagaagtctgtgaccagtacctacaccatcaacgtcatgcaaaatgacaacggcgatatggtggtcactaagaacccaaccatcgcggctgaaccagcgacggcccggatcaagctcccagatacccagtctgataacacggtagccagcagcaccgtagacgacgtaaccaagttcctcaaaacgttcttcgctttgtacccgcaaagtgatcgcaacgaactcaagtattacgtcaaggacggcacgcagccaatcgaacgcaaccttaagttcgtggaacttctagatccagtctttaagcagactaagcgcggtttgactgtcacgttatctgtgaagtatctcgacactgacaatgacatgagccaaatatcgcaatacaccttgatcctatccaagccaaacaataactggattatcaccaacggaatctaaaaataatgcccggcacgcccccttcgcttaaaccaacgtggtggggtgtgccgggtatctttatgcactctagaattagcttagatcccgtcagtgataaaccaatttctaccttgtccaaagataatcttggtgtattgcgatttctaggaatcaacgaccataacgttgaccgcgtaaaacgtgatctgcatgtgctaacgtttcatctacaaagtgaagaatatgcgggtcgtcaagtcgtcgtcatcccgtccaggtcagaccccatcccaatcatcgccataagcatactgctcgtcctcaatccactcgtcgttgtcttccgatttatcccgctcctcggcgttagccagatcaaaaacgtcattcgcctcagccgcttggttctggtgcaaagtttactcagggagagtgcatcctgtatcatgaatttaaactggaggttttcagatgactgatcattttaaatgacggcaattcaatcaatcggtgattacttttgccgtaggctactacttgcgttacaacatcagttatcgagatctagttgaaatgatgcgcgaccgtggtattttcgtgcatcacacaaccctcatgcgttgggtacaacattactcaccgattatgcgggctctatggcgtaagcgccatcggcgcacttccaaaagttggcgtatggatgagacctatatcaagatcaaaggtcaatggaattacctctactgtgccattgatgatcaaggtcttacgcttgattttcaactgcgcaagaagcgtgactttaactcggcctatcattttctcaaacgccttttaaagacctatggtcttccacatcgattagttgaaggcggcgaagcgaattgcccaactcggcgatcttttttaccccattcggtgctaaaattgacaccgctcggcgaaagaattgaccaagaatttcaaaaatggcatcgctgagcgttttcagcgatgccattttcagttttacgggagcttgtctcctcggcacttgcccaggtatttcacgatgacttcctttccatattcgaaaagctcgtcatcggtcaatttatcgtcattttcccagataatatccaccagcgcatcgccaagtacgttttcccagtcttccattgcgtctgtatgtgcatagaacagcgccaatcgttgttccagttctactgaaatcatgcaaattcgcctccgattccataccgctcgcgcatcgatttgtcgccttggataaggagcttgtaagaatcgtggacgattcggtcaaggatcgcatccgcaatctgtggatttcccagcttactatgccagccttccggcgcgaattgagtacaaaagattgttgaaccacgctgacttcgatattcgatcaactcaagaatagtctgagcttgttcatcgttgatcggcgtcaaaagccactcatcgatgatcaagagttcaactttcttgtaccgttcaataatcttatgaaagtcaccgtttgcctcatgcttcgctacaatcaaatcatcaatcagttcgggaagacgcacatattttactttatgaaactgatggcaagcctcaatccccaaagctgtcgccaaccatgttttcccgttacctgaagcacccattaagatgacgttatggtgctcttgaatatacgtgccagtcgcaaggcgttgaatcaagttccgatccaacttacgatccggcaagtaattgatatcagctatacatggctcattcgtccgaaaatttgcactcttgatcagtcgattcagcctatttgactgaaggcttgcgtaagccgcatcaacgagtaacttgaaccgatcatcaaagttcattgatcgatattctgtgttgctttcctgtgcttccaaggcatttgccatagaggtaagcttcatctgccgtaacttccgttgagtttcgtcatttaccattagtcatttcctccaaagtatgctgcaccacgagtaaaaccgtagtcgggttcgttaatcgtctttggtgctggaatcttttgacttttcataacccgttcaactacggacaccgtcggtgcggtcgcaattttcatcacggtcgtacacgcggcttcgatttcaatagctgcgtattttctagctaagcctttgaatcgaaaagctgcacttagaccttgtttttcacttgccgccgatttaagtagatatcgcattacggcaagcgtattgatgccaacctcttccgcccaagctaatgcgttctcaggtgtatgatcgacgaacagtttatgttctgctggcaaatgatcgtgattggttgaaaattgcccgaatttaccggttagtcgtttatgggaggcaattcgattacctttgtagaaaacttctacgattaatgtttaatcgttaaaaaactcgcaaccgaactacgctgcgaatgaaacgcattaatcatcccttcactacggtaccccatggcaatcccaccaatcaacagttcattttccggaatacctattgctttgcggaccgcatctggatacttggccgtttcataggcaggaattgtatcaacttgttcgttagccgcggctaacagaatcgactgactaaaagcccccatgtcataaatcatccatggcgaaactttgcgctcaaccgtcaagtaaataatgacgggcgcattgaacagatggcgttgtaaatcgctaaaattcgctaacccgtcttcgccaagataggcactgatttcatcattccacacgcgactgttctcagccattaacggtccccagtctgtccggtgaatcacgtttaaatcagagtagcctttcatccggtttcccgttcgttctaaatgatcggctaacgtttcacccgtcgctacatagactttccaaggttgtgaattcgtccacgacggtgttcgttgggcggacaccattattttttcgattaattcatccgagatcggtttgtttgggtcaaatgaccgaattgccttgcggtgattaaccacatcgttaaactccatgtgctttcctcctccaactaacacttatttagcgcgttaattacattttaataacgctcataataccagtgtgttggcgtttcacctaatcatttgattggactagaaagtcccaccaccggaaccgccaccaaaaccgcctgatgagccgcctgaaaagccgccagaaccaccactaacacttgttggattagcagcactgaccgcactgccaacactactattgagagctgttgtaaaggattgaccgatgttcaaccccccagtatacccgtagtaataataataacccagaggcattgtttgaagttgttccggcgtcaatcgaatcttcaaagctttaacgaccttatcagcaatcccgaaggccgttgcataacttaaataccgatcccacaatagtacatctgggacattcgccatatcgagtgtcgaaatatcctttagcatttgtttaaagccttgccattcgccccgtttttcgtaacccaattgcgtccatagttgcaaattaaatctacgccagacggttaaaatgaagacaagccccatcggaatgagcgtccaccaagcaactaagccaatcaaagcaccaaaaatcaaaattaaaaatagggcgccaaggccgattaaccaataattcaaactggtcattaactcagcgatgtgttctcgtaaccacccgctacgacttgcttcagtcgccactgctgtttgccacccatggtaatgttgattgaacagttttgcactatgccgttttggatatttctcaatctcaaatagactgacatgctgcccatcaccaatcacatcaaatagccagctaactaacttcttttctgaatgtgataactgattgcgattgacgagcgttaatgaaaattgcggcgtttttttatggaatagttccttctttggttcctgaacatcaattgttagattctttcgagcaactaagtctagaatcgttgcggataagctctccgcccctgctgtctccgtaattggtaatgccaacaactgacgcacaaccgcaggcccattttcatctggcaaatcatagacgtgttctggtgcctgtccagtataagtcatcacaggaagcgtttttcgaattttacgtaaaattaacaagaacatgccgggcgctaagaccactgctcctatagataaaagccaataacggcgtttttgtgctttgcgttcttgattagcttgttgcgccaaacgcgcttcttgtttgataatggctgcccgacgtgattgatcaatccgattcggattcgccgcagtcaccgccgttggaaaaataatatggctttcgacaaattggtttgctggattattagcgagtttaattgtaacccggcctttatcgggttcaacgacttgttgcccatctaaattgccgtgcgtccatgatttaaggtctgcttttttgaatgtggtaggtaattgtattaccacttgaacgttttgtaagtcactatcccacgcatcgccaatcactttccaattcaattccgccgtatcacgataattaataatcagattttgtaactgatatttcaaagtaaccgctaattgattgccatcttgtgcagtttggtatagtttgaaccgataattttgttgtgcatcagttaagctataggtgccttcagtacctgattcactttgactaaacggatgaccattaactgcgacttgcgggttaaccaacttctttggttgaccaacgtttgtttggagattctggttgatatagaccccatggatatcatcttggatatcaaacaccgttttttgttcgacctgagcactcccatcaggttgtacatcaacgtttacctgataacgactgatgtcataggtatcggcagcctggactggctggctaaaaataaaggtccaaaacgccgctattaagataaaaataccaaacttagttcgttttaaattcatagtttgccttcgttctgctcaaccttcgttaataaatcagggtcgaattgccccgctttgagcatcgcaatttcatacgcatatggtgcaaagttatgcttcttatcttcgccaacatatggggtttctagaattttaggcacattaacgagttgttcatgctgtaagacatggtttagcgcatcaaatccgatttcaccaaaaccaatattggcatgacgatctttgtgtgcgccttgtgggttcttagaatcgtttaaatgaacaacttttaagcggtccaaaccgataatgtgatcgaattcattcaaaacgccgtcaaaatcttcacgcacattatatccggcatcatttgtatgacaagtatcaaacgtcactgataacttttcattgtaagtcacgccatcgatcatctgtgcaagttctttaaatgaccgcccgacttcggttcctttacctgccatggtttctaaggcaatttgggcggtttgatcaggtcgtaaaatttcgtttaatcctttgataatttgttgaataccagcatctgcacccgccccaacgtgtgcacctggatgcaagacgatttgagtggcccctaatgcttcagcgcgtaacacttcttcttgtaaaaaagagaccgcaaacttgaagttctcaggcttcactgtattccctaaattaacgatgtatggtgcatgaacaacaattggacctaagttgtgagcttcaatatagggttttgctgcttcaatatttaattcttcgattggtttgcggcgcgtattttgtggcgcgccggtatatatcatgaaggcatttgcaccaaaatcaactgcactctccgctgaccctagtaacatctgcttgcccttcatactaacgtgactccctaataacattccactacctccatgcattttgattacctagattgtcacagaaagcgcaacaaaaagcaagacgaaacctaacccataaaaaaagcccgccattcaattgaatggcgggttatcttatttaatcttaggttcatagaaatgcccgagaattttgacagcttccgtcatgctgacgaatgcgtggtcatccgcttgtttcatgaccatttctaaatcatgcatttcaaagcgagaaataacggtaaataacatcgtcttttcttcacggttatatgccccttctacgtcgtggacaatcgtaatcccacgccgcatttcgtcttgaatcatttgaatcacaactttggacttatcggtaataatcatcacttgcagtttttgttggcgcgtataaaccatatcgatgactttgccgttgacaaaaatactcaagatactatagagcgcatgttcccaaccaaagaggaacccagcggcaaaaacgagcgccacattaaacatgatattgattgaaccgactgaacggccggtttttttgcgcagtacaatcccaatgatatctaagccaccagtggaaatatcgtttttcaaggccatcccggtcccaaaaccgttaattaccgccccaaaaatcgcacagataatcggattagccgttagctgtgtaaagggcataatctgtaccataacacttgaaaaaacaactgcaataaacgtataaatggtgaaatggtggccaattttgaaccacgcaagaataaataatggcacatttaacacgaataacatcaatgacgttgataatggaaatggtagaaacggcataaatttcgacgtcactgtatgaatgaattgcgcgaacccggtaatcccagaggcgtaaatgccaccttcttcccagaaaaagttcaatgcaatcgacacacaaattccgtataaaatggctgccgaaatcttcgccatattttgatgtttccgagctaaatcgtccacttgaatatcacacctatccacttttgatgtctttcattctagcataccatttgtgaatactaaaggatttcttggaattaatgcgcccaattttcacgaatgaaagcacggcgtgtcccctcgaccaattctgctctaaatggttcttttttatagaaatcttggtgatattcttcggctggatagaacggtttggcagcctcaatttgcgtgacaatcggttcgttgaagcgaccactatcgattaatgcttgtttggaagcttccgcgattgcacgttgctcaggcgagttaacgaaaatcaccggccggtaactatcgccacgatcttggaactgccccatggcatcggttggatctgtttggcgccaataaatttcaactaattccgcataagaaataatcgcgggatcaaatgtaatttcaactgcttcagtgtgccccgtcgtatgcgagcaaacttcctcataagttggattaggaacatgcccaccggtataaccagaaacaaccttgataatccccggttgctgatcaaacggatgaaccatgcaccaaaaacacccaccggcaaaaattgctgtatcagttgccattattgtgccccctcttcaaataagcttagatattgaccgtaaccttcattttcgagttgttcgactggaataaattttaaagctgctgagttgatgcaatagcgtaatccaccagcttcttgcggtccatcattaaaaacgtgccctaaatgcgaattagcttcttcactacggacttcaacgcgttccatcccataagattggtcccggcgttccgtcaaaggcgcaattggctttgtaaatgagggccaaccacagcctgcatcatatttatctaacgaactaaataatggttcatgactgacaacatccacgtagatgccttgttcatcaaaatcatcatactcgccggtaaatggggcctccgtcgcattttgttgggttaccgcatattgttctgtcgttaaccgttgttctaaatcatctgtcatatccatcactccttcgtgtttattattataagcagatacaaacagatagcgacaaatatgctcagagtgttctgacagtctgggatttcctgaggattaaagcgaagggacgaataagcgcacagcgcttgtttggcacttcgaattaaccggagggaaatggctgtcagaacacatttagagtgttctagcagtctaggatttcctgaggattaaagtgaattgactgccatcaaataaaaaagatgcctcaaatttacttttgaggcatcttatatgcgttaattttgatttaactgttgttgcactgctttaaagtcagcatagacttcagcaagtggtaccgtaatttcaacaccactagtcatgtctttaacatgtgctgtttgatcagctaattctgattcaccgattgtaatcaccatttgggcgtttaacttattagctgttttaaattgcgcttttggtttacgatcaagatagtctcgatcagcggttaaacctgtatcacgaatcttttcaacgatttggagagttgtcgcacttgtttcagcgccaattccaacgacatacacatcgagtttagattctggaaccaacgcttcgttttgcgcattcatcaataataataatcgttcaacgcctaagccaaaaccaacccctggcatgtccgggccaccaagttgttcaactaacccattataacggccaccggctaagacggttgtgtagccgcgaccaagcaccttattatttgtcataatttcaaaaattgtgtgattgtaataatcgagtccgcgcaccatttcagtatccacttcatatggaatgtgcaatgtttcaagtaagtgcttaaccgtttcaaagtgcgccgttgcttctggtgttaagtaatccaaaataacaggtgcatccttcacaatttcttggtccttagcatctttactatctaagacgcgcaatgggttcttgtgtagacgaactttagaatcgtcacttaattcatcaaaatgtggttcaagatagctgacaagggcttcatgataagccgcgcgactttccgcatcccctaaggtattgatggccagttttaaatccgtaatatggcattcacgtaataaacgcatcgccatgctaatgacttcaatatcgaccgctggactctcagaaccaaatgcttcgaccccaatttgatggaactggcgttgccggcctgattgtggccgttcataacggaacattggtcccatgtaatacaccttataaggtttttgatgttctggcccataaagtttattttctacgaacgcccgtacaactccagctgtgccctctggacgcagcgcgatatgccgatcccctttatccatgaaatcatacatttctttgctgacaatatcagatgtatcgcctgaactccgtgaaaagacatcatagctttcaaataatggtgttctaatttcgttgaattgatagcgggcaaaaacgtcgcgtgccgttttctccactaattgccactggtttgaatctccaggtaaaatatccgcagttccttttggcttttgatagcccatgatcattcctccaaatggataccaaataaaaaaacacccctgtcgttgaacaagggtgcttaaatgcacggtaccaccttaattttagcttaattatataacgttgttgccaacggtgtgcgaccacacagacctcaaaagcagtctcggcgtgccattgatttcttgcagctgtgaaatcatctctgtcgtagggggcttagcctttactttatcactggtcatcacttattcttattgttataagattaacgttatttcaaaaaaaagtcaatcaatcttgaattttttgtaactttttcgctgaaactctttagaaagttgagttttttgctataattaaccttataaattaataaaacataacaaaggtgttgaaaaaaatgcagaaacctttgagctggtttaaacactatccggccgttattatattagcattactcgtttttgtcggtctctttgtgacccacgcgctggctgcttaccaacaaattacgattaaagcgaacgtcgtaaacattcgccaaggccctggattatcttatgatgtcatgagtcaagccaataaaggcgaaacaatgaatgttatctcacaaaagaataattggtaccaagtgcgcttaagtggtgataagattggctgggttgctagctggttagtcgataacaccgaagtcagtgccacttcaaaccgagtcgctaaggtcaccaacagttttgccaatgtccgccaaagcagtagtgccgatagtcaactactcggtaagttaaatcaaggtgacgaaattacagtcttataccaacaaaacggttggagccagattaaatacaactcagcagttggttgggtacaaagtgatttaatcgaagtttccgaccaagctccggcgactgttcaaaaaatgacaaccgctgaatctgagtctacggatactgatacaagtagctccgcgattaaatcagtgacaacccaactggataataccaagctacgcactggtcctgatgtttcgtatcaatatacccaaagctacccggccaataccaagctaacttatatcaataagagtggtacttggtatcaagttaaagatgccgatggtaataccggttacgtcgcaagttgggttgtcactccttctgagaagaatgaagttgttaagactagcgctacttccctttctgaagccaccattgttttagatgctggtcatggtggcaccgacgtcggtgcactttcaactaagtctaagtatgaaaaagactacacattagcgaccgtcgatgcgattgctaaaaaattaaaagcggctggtgctaacgtcgtgctaacgcgttcaaacgatagttttgtcgatctcgaaccgcgacctgctcttgccaataaattaaaggctgatgcctttatcagcgttcattttgattcaagcaatgaagccaatgaagcatccgggacaacaacctactactattcaagcagtaaggatatgagcctcgcgaaggccatcaacaatcagactaagacattaccgcttaacaatcgcggcattgaatacggcaattatcaagtccttcgcgataatcaacggcctgctgttctcttagaacttggctacatcaattctgataaagactttagttatattagcagtgctaattaccaagctaaagtcgctgatgccgtttataccggcttaaccgactatttcaaataactaaaaaagaactgtcagattaaatctgacggttcttttttacataattggggcaaacaaacgcgctaagtcctgtgaccaacgttcttgattgctttgctcttgtatccgttgtttcgtaaatggtaagcagtcttttaaatcagccgtaaaagattgttcaagttcagttgcgagttgtgcatcatataaaaaagcggtcgtttcaaaattcaatctaaaactgcgaatatctaaattagccgtcccaaccgctgctagttgcccatcaactaacattacgcgtgatttaaatccggttgattcagagaagtaaatctgaccgcccgccttcacgatttgtctagcgtaatacaaactcgcatgatgaatcattttatgttttgcacgtttggccatcatgatcttcacagtcaccccagaattaatggctaacactaacgccgccaatacagaatcatccggaataaaatatggggtctgaatccacagccgttttttagcggcagcaatcatcttcaaaaagcctaacttaatctcatcgagttctcgatcaggtccacttgataccagttgcatgctagtctgcccgtgttcatctgagttaggaaaatattgcggactgtaatacaccttttcctgacgcgtagccgcattccagtccatgaaaaagcgagcttgaaacgataacacaccatcgccggtaatccgaatccgcgtatctcgtgcaggaatattaacgtgatgattattctggttaaaatcgccaaggtaggcggtattgccatcaattactgccaattgccggtggttacgaaagttaaagcgtagattaacgaaccggaaccgagaactaaaaaacgggacaacttggccgccggctgcttccaatggcttaaagaactgccgggataaatgttgcgacccaaatgcatcatacatcacacgcacttttaccccccgcagtgccttgtaagccaatagattgaccagttgacgcccgtgttcgttgtcataaaaagcatagtattcaagatggatatgatcttgcgcccgattgacatccgttaacaactgttgatacgccgccttcaaatccgttaaaattgttacattgttttcctgggtcacaaccgcggtatttgatactaagaagaggttgattaagctctgcgtttctggcggtaacgtgtgttgcttctgcgcttggcgtaacgctgctttttgggaggtcaccaaggcatcaatgccgagccgttcttgtgttttcaaatcgaccatatgatcttccggtaatttttttccgaaaaatagatacaaaacaaagccgataattggtaagaaaatcaataccaagagccaggcccaggttgctgcaatatcacgttgttggcgaaatacggtggtaacagccccgattgtatttgcaatccaaatcagtgctatcccccagataatgattgctgtcattcttcattcatcctattctttaaaccactttgcttttaatttggctagcgtaccatttgcttgtaagacccgataacgtcggttgataaattgacgtaattgttgatcttgcggacgcatcccaacagcaaactgttctgctgcaaaaggactgtcgatggcttgaaaatcgctgccattgtggcgtgacttaatttcaaattgcgcgtagacttcatcaattaagagccccttaatccgatcggcctgtaagtcgataaacgcattgttataagtatcatataggattggtgcatggttggcaattctttgctgtaatcgtttaggataacgctctagttgttccatcccagatgagcccgtttgaacgcctaatggttggttggttaaatcagccatttgattaacagggtgtttcttgagcgacacaatcatttgccgattagtcagatacgggtcactaaacgcaacccgttttgcccgttgcgccgttttagaataaccactccaaattaaatcaatcgtttgattattcaattccgtttctttcatatcccaatcaatcgactgaaagtcaacccgaatgccactccccttaaaaatcgcccgtgccaaatcaacatcaaaaccggttaattgaccattcttctcacggtaagtcattggcacaaaactatcatcaatcccgacgactattttttggcgtttttgaatcgttgcccattgatcagcctgctgattgcgttgtgcgcaccctgctaaaccaatcatgctcatcaataaagccgctattaatgctgtttttttaagcttcatcattttgttgaaccccgtttggttgtaattcaaagatttgatcagcaatctggttggcaaattgaatatcatgggtgacaacaatttgtgtcattccctgctgtttcaaatctaaaatgagttgtgcgacacttgccactaacgatggatcaagtgcactggttggttcgtcataacagagaatctccggttgcatcgccaatgcgcgggcaattgcgactcgttgacgttgaccgcctgatagttggaacggataagccgtcgcctgagcacttaaccctagttgctgtaataattctgcgccatctgctttagcctttttagcgggttgttttttgaccatgatgggtgccagcgtcacattctcaaggacagagagatgtgggaataaccgaaaatcttggaagacaacgccaatgcgcgccccttgttcccgattactaggttcgtaaggtttaccatcaataataaaccgtccgctatcgggttgatcaagcccactcattaaccgtaataaagttgatttgccagcaccacttggaccgacaatcgctaaaatactccctgattcaactaataaatttaagtcgttcaaaatttgccgacctttgaaggattgattgatattttctaattgaaacatgttgccgcctccttagcgataataacgataatagcgttccaaacgccgtaatgcccatgtacaaatggctgttaacaataaataaataatcccgactagcaaaagtggtaagagattgacatcacgcgcacttgcgacattgccagcccgcagtaaatccccaatgccgataacatacactaacgatgaatctttaatcaagttgatcacttcgttaccgacagacggtaagacaattttaaccgtttgggacacgataattttagcgattgtttgtgggtaagttaagcctaagacctcagctgcttcgatctgaccattatcaacggcttgaaagccgcctcggaaaatttcggcaaaatatgcagcataattcaaaataaaagcgattaaagcagcatcgaaccggttaaaaacaattccgaccacgggtaaaccataaaatacaaaaattagttgtaataataacggtgtcccacgcatcagccacacatataaatctaaaagataatgcagtggtttaaacttagctaataaccctaaacttaataataaaccaagtggaatcgcgccaataatcgttaggccaaaaacagccaacgtcatctgcgccccacttaataatgctggtaaaatcgataaactatagtcaatcatgacagactcctctcatttgtccaaaataaaaagccctctttgcgtttaaaacacaaagagggctaaatttcgcggtgccacctcaaatttttgtttgcctcacaacaaacaactcagttagttttagaccaataaaaaagtcccctggatttctccaagaggacgaatttatcgcggtgccacctcagtttaataaactgctcacgcagcttaaacttatgtagtttctaaaactacagcgataacgggctaacggatcatctttattcgatgatcaaactcacggttgtgccattaatctcaagggccgacttccaccacgcatcagctctctgaacctcaagaattaatttggaccgttcaacgtttaatgtattgttattcattctattcaatatcgcatcaaaagtcaatggttaatgtttattgcttaccgaaaagacgggcccagaaaccaaccttgtgttgtttcaaagtcatcaatggaactgtttcgcctagtaaacgacgggcaatattccgatagccttggcttgctgggtttttcggatccatcacaattggttcgccggcattggacgtcttgataaccgcatcatcatcaaaaataatgcctaacaatgaaattgaaagatgtttggtaatttcatcaacatccatcgtttcgccttcattcatcatatgacgccgaatccggttaattactaagcgtggcgcaatccgcatttcttcttcttctagcaagccgacaacgcggtcagcatcactaacagaagaaatttcgggagttgcaaccacaattgcaccgtctgcaccggcaatcgcatttttaaagccagattcaatcccagcaggacaatcaagaatcacaaaatcgaattcttcttttaattcattcacgatggcggtgacttcatcaggcgttaacgcttctttatccgcattttgagcggctggcaataagtaaattttttcatcaaaacgtttatctttaatcagtgcttggtgcaacttagcacggccttgggcgacatccacgatatcataaataatgcggttgctcaatcctaagacaacatctaaattacgcagaccaatgtctaaatctaacaagcaaaccttcttatctaaaagcgcaagcgccgtcccaatattggcgcttgatgttgttttaccaacgccgcctttaccggatgtaataaccaaagctgttcccatttttattgctccttcattttacgatataattttggattaatctgtttcaaatccgttaactcaccgtagtcgataacatgtaaatcattgatgaaacttacactctgtgccgtaaatggcgtcttctggtgatcgagaatctcaactgcgtctgctatccgcaattgtaacgcgtgtgataaatcacctgcaacaactgcttctgcattatctggaaaaccagcgtgcacaatcccggcaacttcaccaagtacgaagatactgcccgttgcttttaacattgcgccttggtgtaaattaccgacgaataagacatcgccaacataattgacctcttggccgcttcgtaaaacattgggttcaacgtgaatactattttcccgccgatcaatctcagcctgttcaatcgtcatgacttccgattgaatgcttgtcacattaaattctggaaactgctcaaagacggtcgccagtgcttgcttttgcgcatcattcaacaagcgtctaccagtggtcagctccagttcaatctgattgctccccaactgcggttgctctaagcgaatcttattcaataattccgctagtgcaactaatgcttgatcgaaatccgcacccgcatcaatgtttaattcaaaaccttctttgcgtcctcgtaacgtgactgcatccatagaaaaatcaaaccccttaccgttctgattttaattttagcaataaatattttaaaggcaaatacaaaaagacaaaataaaccaaatttaatgcaattgtcggtgctaaaacattactaataaattcgactggtgttactgttgcataaccaatcaagcgattcatgatgtaaatcgtactctcgagtaatgttaaacacaagacatcgattagcccaatgaaaaaggctgagtcaggtaaatattgttttaaataacgcactgtatagataatgagcggcaccgcaaaagtgtacatcccgatcatccccgtataatacaaatcgtataaaagaccaatccctgctgcataccacgtaagttggcgttcctctggtaaaacaaaggccgttaccactaacacgagcataaatagccggctaatcaacgtatgatctggtgtatataaccattgttcacataaatgactgatggcgccatccaaataaaacgcaacgagtaagtagattggtaataaatagcgccgttgtaatcgcgtcacacccatgctactcaccttcaatcgttcgtttgatgacagtcacaacggttaagttgtttaaatcagcagctggggtcacataaacagttaatgctaacccaaaatcgtctttcttaactgctgctaccttaccaaggtacaagcctttaggggttaatccacctaaaccagacgtgattactttgtcacctttttcgattgccgcatcggtcttaatctgcccgagcttcaattgtttccggtcagcattgtaaccggacatgatcccattaacttgcttaccatctttggtattcaccacagcagcaaatccgttactactttgatccgtacttgaaacgagttcaaccttcgaattagtcttgttgacttcaacaatccgtccaataatcccagactcagacatgacgggcatatcttttttaagtccagctaaggcccctttattgataaccaatgcattttgccaattatcaggattccgggataaaacagacgcattaacggttgtataatccgtcaaggtgccttttaagccgagttcctttttcaaacttgcattttcttctttgagggtttgggtttgaaccttggtttgagctaaatcatcaagttgtgctttaagttctttgttttcctggtacgtattaatcaagtctgttaaggcatctacccctcgaccaatcccattggccggcacgctaatgacttggttagtgatgcccgttacgtcgttgccaaattggcgtacgaaactcggactctttttgttattgcgtaaaccaactgacattgcgatgaagcccatgcagacgattagcatgattaataacacaattaacttcttatttgaaaaaaacttttgcatggtttcttcgccaccatccatccttaatatcgtaaaggtgggacaaaaaccggtgatcagtagtccttcctatagcaatcgattcacaacccgaatctgtcactaatttaggcgctacgtcaacgctgaccgcttcttgtcccacttctactgaacgattaatttttcttcataacatcgatattctttaatgattcgccagttccgactgcaacacagtctaaaggatcttgagcgataaagactggcactttagtagcatctgaaatcacttctggtaagtgtttcaacaatgcgccgccaccagttaagacaatcccgtgatcaatcacgtcggctgcaatttctggtgatgtttcttcaagtgtttctttgatggcttcgataatggctgtgacaacttctttgatggcttcagcaatatcaacagcttgaatgtccactgtcttaggtagcccagttactaaatcgcgaccacgaatgctcatcgcttcaatttccttagcgcgttctggtgatgctgaagcgatttggaatttgatttgttcggctgttctttcaccaatcaacaagttattgttttgacggatgtaagaaatgatcgcgtcatctaacttgtcgccagccattcgaattgaacggcttgaaacaatcccacctaatgagattgtggcaacgtctgttgtcccgccaccgatatcaacgaccatgctaccagttggatccatcacaggaagaccggcaccaattgcagctgcaaatggttcttcaatgacgtatgcatcacgagcgcctgccaccttagttgcatcgattacagcacgtttttcaacttcagtcacaccacttggtacgcagaccattacaaatggcttgctagatgagcgacctaatgatttttcgataaaatatttaagcatggcagcagttgtatcgtaatctgcgatcacgccatctttcattgggcgaattgccacaatactaccaggtgtccggccaatcatgtcgcgggcttctgagccaacagcaatcacgtcaccagtttgtgtatttttagcgacaacagagggttctctcaagacaatgtctttaccgtccatgtatacgagtgtgtttgcggtacctaagtcaataccgatatttctagtccctaatccgaacactatttttctctccttcagttaccaaacgtttttatagtcattggcattatatcataattttacgtaataaaaaacgcaatgtaactactatgttaacggattttcagaaaatttgacaggtctcgcctaaaattaacagattcttaaagaaaaaagcgttctcttttactccactaagtaaccctcttctcgcaaactgagatactgctggcttccaataatcaagtggtctaggcatacaatgcccatcagttcaccacaggcgacaattcgtttagtgaaggcaatatcttgcgttgacggcgtcaactggccgcttggatgattatgcaccaaaataaattttgctgcagaataacggaccgctaatttaaagacttcccgcggatgcgcaactgaactatcgagtgtgccaatataaatctgtttcatctgaataatttgatttttaacgtctaaaaaaacagctagcagttgttcttgcgtttcgcccgctagtgtttcaatcatgcgacggccaaccatttggctcgatgcgaccacaccaaaccggagagttcgttgcgtttgcaatcggtgactcaattcacagatggcttggatttcaatcgctttgactggtccaattcctgccagtgtttccaactgcgttaaacttgcttgttctaaatcccgaaagtcaggataatgcgctagcaatttgcgcgccacctcaccaacagataggtgactattaccagaacgcaaaatgacgattgccaattgctcgttcgataaacttgctgcgccgtactgcattaattgttctcttggttgtaattgtcctgtattccccgccattgtttgcctcccacaaaaaaagacgcatgacgcgtcttcttggtttaactaacaatacgttaattaacgggcttatttttctaaatacggaatcacttgagccaaatccccaacggtcgcaagtgtttgctgattggttatcgcagttggttcaattaaatcagggaccataatcaccggaatggcagctttactagcggccatcacaccattaggtgagtcttctaatactagggcactaggcgctggtaaggctaatctatccaacgcttttaaaaagatttcggggttcggtttgccgtgagtcacttcgtctcccgcaacaatttgactaaaccgtgattgtaggccagtactttgcataaagtcatcgaccatgctgcggaaattgctcgatgcaatcacccgactaatcccctgattatcacagtaatctagtaaatcgactaaccctggcttaattgcaacaccatctgcttcaacaaccgttgctacgttacggtatgaacgatcaataaattctgttgcggccgttgccgaacccagcttcgctttaaaataattgcgtaaatacgtatcagtggtccctaagatggcatggtgatcttcaggtgtaaaatcaaagcccatttctttagcggcccgaatattggcttggtaataaatcttctccgaatcaaccaatagaccgtccatatcaaaaataattcctctagttgtcattgactattctcctttaaaatattggcgaatcgtactaattaaatatagcgaacccgttacgagtaatacatcatcagccgacacatccgctaataattcggttaatgcaaccggccagtccggttcaaatgtaatcgtctcatcaactgctgcatattgggccgctgttgccgcgcgtggattatcaggaaccgtagtcagcaccatccgcgtcgctatttttttgagctgtggtaacatctcatctagatttttatcaccaagcgctccgaataacaggtaaatgtcacgatttttaaattgatgccgcgttgtctgaaccaattgcgccaccccttccggattatgtgcaccatccaagataattaacggctcatcgttgattttttcgaagcgcccaggccagttaacccgttttaaagcacgtttgatgtctcgaacctctagtttttgttgcgtcaactgtaagtaacaccaaaatacttgtaatgcaaccgcggcgttttcaatttgataatcccccatcagcggaatctgtaattgtcgatacgttaccgcgtcattttggaaagttaactgttgcccccaagtaggtaacgttttgaccgcagcactcgaaaaatcacagccactaatggctaacgaactattcaaacgagttgccgtttcctcaaccaccgtcagtgcttcttttggtaattgaccaatcacgactggatgaccagccttaatgatcccggctttttgagtcgcaatttctgcaaatgtcttgcctaatagagcctgatgatcaagaccaatcgacgtaataactgatatcagcggcgtcaacacattagtcgagtcatacaaaccgccaattccgacttccacaacggcgacatcaacctgctgttgtttgaaatatagaaacatcattgctgtgatccattcaaactcggtcacctcaaattcggggtcagttgtttgaatctgggcaaccgttgtctgaatttgttgcgtaacagttactaaatcggcatcactgattggttcctgattgatagcaattcgctcgttgaaccgcataataaacggcgatgtgtaacgaccgacttttaaacctaactcttcaatcaaacaactgaccattttgacaacggatcccttgccattagtgccagtcacatgaatgaattgttggttttcttgcggattaccgagacctgccaacaattgcgtcattcggttcaggttcgcttctttatgtaatctggggcgcgaatgaatatacgccaaagctgtttcgtaatctgtcactaacatcgccaatctcctttaacaaactgtctctattttagcatagattgcacgcgaatcgatgcttaaaaactggcgcacacaaaaagaccacctcagtttttaaggtggccttaacgtgcttttggttgcaacaacttccgcttaatctaaaaattccgttaatcctaaaacctgaattaacggaatttttgtattgatgctcagttgctacccgcaaccaatcacacttctttcactaacgtgctcctcgagcagccttttccggttaactgcaaaatgggcatcatggcaaaaaacgccacaatgcccattttactgttaatcctcaaagcctaaccagctcgagtcgcacttcttttttaacgtgttttcatcaacagcttcctgtgctttgctacacttatcaaatcggcgcttacagcgccaattcgctaagttaggcaaatgctcagaagctaaccgttgatgatgcacttatgcattttttaattctgctactcgtttttcgactgattggtattgttgttcgtagtctgcttgtttgtcgcgttcttcttggaccactttttctggtgcgcggtctgtgaagcccttgtttgacaacttgcctttagcacgtttgatttcaccgtctaaacgtttcaattcgccttctaaacgggcgatttcttcgtctaagtcgagcaattcagccaatggcacataaacttctgcaccactgataatggctgtcttcgccaatgctggtgctgttagaccttcagcaatttcaagtgacttaggatgtacgaagcgttcgatgaagtcttggttttgtttgaagatcctcattaatggcgcatcttgaatgttgaccaagacatcaattggcttgcttagtggtgcattggcttcggaacggatattccggacacttctaattagatcgattaacgcgttcatttgcgttgttgcttctggatcgtctaattcagcgtgcacttctggataagccgcattgacgattgaattgccagtatgtggcatactttgccagatttcttccgtgacaaatggcatcactgggtgtaatagacgcaatgtttggtctaaaacataagccaagttataacgtttattggcaatggctgcttggtcgtctccgtaaaggacttccttcgccatttcaatataccagtcacagaaatcgttccagataaagttatacaatgtccggcccgcttcaccaaattcgaagctttcataaagccgtgtaacatctgccaccgtttggttcaattggcttaagatccatttgtccgttaaatcaaggttagcggcatctggcatcttcgttggcgctggtgtgtcttcaaggttcatgatgacgaaacgacttgcgttccaaatcttattgatgaagttccaggcagcatccatcttcgtgtaactgaaacgaacatcttggcctggtgttgagccactcgttaagaaccaacgcaatgcatcggcaccgtatttttcaatgacttccattgggtcaatcccattaccaagtgatttactcatcttacggccttgttcatcgcggattaaaccgtgaatgaggacgtgttcgaatgggcgttgttctgtaaattcgagactttggaaaatcatccgtgagacccagaagaagatgatatcgtagccagttaccaacgtattggttgggaagtagcgtttgaagtcaggcgcttcagtgtttggccaacccattgttgaaaatggccataaggcactactgaaccatgtgtctaggacatcagaatcttgagtccagttttcgatatcttttggtgcttcttcgccgacatacatttcaccagtttgtttatggtaccaagttgggatttgatgcccccaccataattgacgcgaaataacccaatcatgaacgttttccatccattgtgtgaaggtattttcgaatcgttctggcacaaagttcaccttttgatcggttgcttggttcttcaaagccatttcagcaagtggcttcatcttaacaaaccattgcgttgaaagccgggcttcaacttgtacaccagtccgttcagaatgaccaacactatgtgtcattgggtcgactttaatcaaataaccttgttccttcaagtcagcaacaatcgctttacgtgcttcaaaacgatccatgccgttatacttgccggcactttcattcatgctggcatcttcgttcatgacattgatccgtggtaagtcatgccgattaccgacttcaaaatcgttagggtcgtgtgctggtgtaatcttcaaagcaccagtaccgaaatccttatcgacatagtgatcagcgataatcggaatttcacgattcattaatggtaatgtgaccgtcttgccaacaaggtccgcataccgttcatcatctggatgtacagcgatagcagtatcaccaggtaatgtttcaggacgtgttgtggcaatttcgatgctcccagaaccatccgtcaatggatagttaacatgatagaaggccccttcatcatcttgatgcaacacttcgatatctgataaagccgtccgtgcttttggatcccaattgatgatgtattcgccacgatagattaagcccttgttgtataaggtaacaaagactttacgaacagcgtctgataagccatcgtctaatgtgaaccgttcacgtgaataatcaagtgataagcccatcttagcccattgtgcgtggatggttgcggcatattcatctttccagtcccagacttgttcgatgaatttttcacgacctaagtcataacgtgaaatcccttgttcagctaattttgcttccactttagcttgagttgcaatcccggcatgatccatccctggcaaccagagtacatcatacccttgcatccgtttttgccggattaacatatcttgtaaggtcgtatcccaggcatggcctaaatggagtttacccgtaacatttggcggtggaataacgattgaataaggtttggcatctggattggcatttggcttgaataaatcagcatctaaccaatcttgataacgaccggcttcaacttgatttggatcatatttggttgacatttctttgtgatcagtcatcttgttcactcctttaaaatattgcgtttaatggcaaacaaaaaagcattcctcacaataggacgaatgctttttcgcggtaccacctaaattaggactagactagtccccaactcatgatttgttaacgaacgaaattgtccggttagccctacttaatttcaggttaacagctcacaagctaccgattaattggtcattggaagacgtctcagccatgcatcttctctctaaactagcccaatcttaatcgctcttgttcaacgcgttgttaatagtttagctgagtgaacgccaaaggtcaagcgtcaccggcgttcattctgaaaataaatcccgaatcttctccccaaaaaaatcctgagaacaacatactgttattctcaggatttttatagtttacaatagttcagcaatgatttcttcgtcttgatttaagaattgatcgccagctttgatttctgtcactctaattccagcaattgagcgttcaatcaaggcatccacatcgatgcgttgttcgtagaaccgggtcttatctaagttaggccgggtcttcggtgctggtggtgcaaaaatggtacagcaatcttcgaatggcatgattgataattcgtacgtatcaatatccttcgcaatttcaatgatttcattcttatccattgtcgcaactggccgcacgattggcgttgttgtgacatcattgatagccatcatactttcaagtgtttgtgaggccacttgaccgacagattccccattaaaaatggctaaaccttggcgcttagcacggatttgatccgttaaacgcaacatcatccgccgttgaatggtcattaagtaaccttctggcacagaatgcttcacttcttcttgaatttccgtgaatgggacttcgataaacttaatcccaccaacgtatggcaccaatttcgccgttaattctttggccttattcaaggcattgtcgcttgtgtatggtgggctaaagaaatgcaccatttcaatgtcgacaccccgtttgagcgttaagtaacctgctactggtgaatcaatcccaccagataacatcaacattcctttaccggcagaaccgactggtaagccaccagccccttgaatcacttggttggttaagtaaatcgcatcttggcgaatttcaacccgcaaagtaatgtcaggttttttcatttgcacttctaattcaggtaattcatctgataagtaaccacctaattcgcggttcatatcattcgtatccaagaagaaattgtgatcagaacgacgtgtgttaactttgaaagacatcccaggtttgccgatttctttcatcatggcaagcgccatttctttaacagaatctaaatcacgatcaacttggatacttggtgagaagttttggatgccgaagacgtgacggagacgttcgataacgccttctgcatcgtcgccgtttaaaacgatatgcatccggtcacgtttagggtgaatccggagttgtttatactcgtgaagcgcctttgtgacgttcccgtttaaccgaccgataaaatcgttccggtttttaccctttgtcgaaagttcgccgtagcgaaccataatttcagtgtattgcatgcctatctccttttagatggtagtttacgaattaatttttttgaagcgttcgttaatttgatcgaatgctttgatgaatgcatccgcttcttctagcgtattgtattcatcgagggatacccgaatggcgcttgtcgcaattttttcattgacgtgcattgcctttaaggtactagattcagtccctttcttcgaagagcaagcacttgtcgttgaaatatagatttcgtgttcttcaaacgcatgaaccgttgtttcaccgcgaacacctttaattgcgaagcacaaaatatgcggcgcaaaatcaggcgtcagttgtgaaaacataaccgttttatccgattgactgacatggttaaagagtcgttctcgaatagctgcttggcggtgtactttttcagtctcatcggtcaataacaaacgtaaggctttggccattgccgcgatggctggcacattttcggttccagaacgtaaatcatgctcttggcccccaccggttaaaagcggcgctaaatgacgcccgcgtttcttatacaaaatcccagtcccccgtgggccgtggaatttatgccctgataaggtcacaaaatcaacgcgttcgttgaaaatcgcctcttgaatgcctttgccaatcccttgaacggcatcaacgtggaaatgaatattaggataatccttcaaaatatcagcaatggcttcaagtggctgacacgttccgatttcgttattaatggccatgatcgaaactaaaatggtatcaggccgcaatgctgcttttaagtcagccggatcaattcgaccaaactgatcaacgggtagataagtcacatcaaagcctaatttttccagttgctgcatggatttaatgatggctggatgttcaaccgatgtcgtaattaaatgtttcccaaacgcccgtttttcaattgccgtgccttttaagacccagttatcgccttctgttccaccgctggtaaagaagatttcatcgtggtctacgcctaataaatcagcgatttgttggcgtgattgttctaaaatatgaaaggctttttccccaatcacatgtaaactagaggggttgccgaagaactgttcactaaccgcttgataggtctgaagtgcgcctggcgcgattttagtggtggcactattgtcaaaataaatcatatcgatccttcttactaaaaattagtgttttaacgttgtacattatagcaaattggttattaaagacaaccaattaatctttaacaaaacaaatccgagacaaaatgcgtcttgtctcggactggtgagcatctaagtgactaattagttgcgtctgacttttggtcgtaataggccttttcaacttgtgtgtaagcacctggatcaaccttttcaagggccgttgccaataagtcgacagctttagcatagtcgtattcttcattaaaaatggtttggaccgtcacacaggcttcctggatggcgggaaaatctgcacgatatcggttggcatattgtaacaattgctccgtaatcaatgcactgtcaattaaggtatccgtcttggccttcaattcatctaaatcctcttgaacgagaattaattgcttcgcgatatcgtctaaattaatcttaatttgattcaaatcatgatcaagtttttgaatctcatcagaaacaacgaagaagaaatccaaatatttctgttgtaaaccaggtaaattaaccttttcaacagcgcgcttcaagttacgtagttcaagttcaaactggcgtaagttttcattagcgacgacttcgccttgatgcaaactagcaacctgatcatgaattgcttgttgtttttcttcgatgacagttagccgttcgtcaatcccggtcaaatcttcagcaatcgccgtgtaaaccgcttcgtggttggcaatcttcgcttggtgcccttcaactaacgcctgttcttcaccaatttgcttttgtaattgtttggcgcttgccaactcaccatgtgtgagtgcataactctgattgagatgatcgagttccaataatagctcatggttctgacgttcagcatgttgcacgaatgtcgcggtggttggcaattgcgtcgcgactgccttcttggcagtcatctcagcttctaattgatcatataattgatcaatgccacgtgcaatttcatcgttattggcttcaaccgactcaatggccaaatcacttaacaaggtagtgctcttatcaagttgatccattagttgttgttgtttgacttcaatctgccgatcatcaaattgataatgttcttttaacatttgatggtaggtatcattaatttcaaccagttgttcgggaaactcgttagctaattcgttatagcgctttggaatccgtcccatctggtcttctaattgcgttgtttcagtaattaatttctgcaaaatggccttagcccctagatggtcgccggctgttgttagttcgttggcttcgtcaaaatccacctctaagcgacctagcgttgcttcaagcgcatctaatgcaggtccaaacgaaaaactcttagtcaacaaacgtttacgtagttgttgatattgttctcgtagacgctgaattttttgacgtgtatcggcttcattggcaagtagattttctaaagcatcttgaacatccagtaaatcttgatccgtttcagtcaagtacgcccgcaattgtttgagaatccgtgcaacctgaatgaattggtatttggcattggccgtttccgcatcaaaaagatagccttcaatcgtgctgaagttatggttggtaatctgctcatattgtttttcccaacgatcaaagttttgcaaactttcgcccgtcaaatgtaacgaccgtaacttcgttaagcgttccggaatcggcaacgccattaagtcgcctttatgtgcttctagttgtttaatttgtttgataaaataacgttgataaaaaacaacacttaggtagccaatcagtgcgacgactacgattccaatgagaatgtaaaacattcaaagacacacccttttacaatttaaatcagatttattagtccgttcatccacttcaattcattaaactatgtttgattatagcatgaataagataacggttcagcaataattagcgataaactttagaaaagctgcaattttaatctgaatttgcttgacgttgccgcacaccgtacgctatactagccattgtgtaaaataatgcagcagtaaacggtaaagccgtcaacagttcatttgcccagagttttggttcaattgtgtaaccttgcggctgcaaaggtgaagattgttaataagtgaactgaacgattactaagtttacatcggattattttactccaaaacatttattggaggatttttttatgtcacgttatacaggtccaaagtggaaactttcacgtcgtttaggaatttcactatcaggcacaggtaaagaacttgctcgtcgcccttacgctccaggccaacacggtaacgaccgtcgcggtaagatttcagaatatggtatgcaattgagcgaaaaacaaaaacttcgtttaatgtatggtttaacagaacgccaattccggaacttatttgctcgcgctggtaaaatccgcgaaggcaagcatggtgttaacttgatgatcttgctagaacaacgtttagacaacattgtttatcgtttaggtttagcaagcactcgtgcacaagctcgtcaattagtaaaccatggtcacgtaactgtcgatggcaaacgtgttgatattccttcatacgaagtaaaacctggtcaagaaatttcaatccgtgaaaaatctaagaaccttgtaatcgttaaggatgcaatcgaaggtacagttggtcgcccttcattcgttagctttgatgctgacacaatgaaaggttcacttgttcgtttaccagaacgttcagaattagaaccagaaatcgacgaagccttaatcgttgaattctacaacagataagcagttatctgttcaattaaaagagtcagacttaggtctggctctttttttgcgcatttaaagacgcgtgcctacttagcacacgcgtctgatttaatctatttagtctgtaccaactcatataaaggcaccatcttcatcaaggtcgtttgaatatcggccatgagagcttcgggttggtcgaataatgggttgtctttcagataaacttttccgaggagccactccccttttttggtcttagcaaacttatcttgaatcagtttcaagttctccgatgacattgggaatttttgcttggtcatgtgatcgtagcttaaatcatagtcggcaaagtcccttaagaggctttctgtttggcttgccaataacggtgcgtaatccgtcttatctggcatctcagccattaaagcaaaccaaacgaagatccgatcatcccaaaaaccgacttcaaagtgcggcatcatcttatacccgcgtgagctctcactaagtgccatccaagtattcattggtggatttttgaagcggcgtaaatgcttggcaatatgcaacgagaattcgcgttttgtttctgctacgagttctgcttgcaattgcgcaccaaatacttcaaactttggatcaagttgcgtataaatcttgtctaaccggccctttaaggtttggtcatcaaaaatatcaaaatcagcacgtgtaaacatctttttcctccaacatggtatacttaggtttaattctaatatagcacaattcagaaatgaggcgactattttgtcagataatgatcaattacaacaacacttggatagtgccatgcacggcgcaccacaaaccaatcccgatgaacgccgccgctacctcggctcattacgtgaacgcgtcttcttaggcattactaaccaggaactcgccactgcgcaagctaaattcgaagcgcatcttacggattataagccctattccgtcttattaaacggcaagaaccccgctgctaccgattatttagcggccctttcagcacacgggattccgttcacgctcgttaacaacgaaacagccaaaaccgaaccaacggccttcggtttgttagtggttgccaaagacgcgattaaccatgaggcaattacgctcgatacactataccctgatccaaaaaccgcaacgcaagatgcacccaccaaaaaaggtggtttcttaaaacatcttttcgattaacactaaaaaggcccgcacagtttaacttgtgcgggcctttttgcattactttagtcggtttcaatcgctaattctgggaaaagtaattgtaagacagtcattgaaacgcgccgcgcttgacccatcattgggaacaagtgcatcaacatcgctggattgtagtttgcttctagcacaaccgccatctcagggtgttccggatcatatggttggtataagtttggcacaatgatatcgattcccgtgatactgaggttcaaaatttcagcaacctgttcagcaatcgcaaagtaactttgatccatctcatcggtcacgtcaaccgaatcaccaccatttgagacgttggaattttgtagtaagaagacctgtgaaccacgcaatggcacatcttcagggcggtaaccttgttgtttcaacatgagcaattcccgttcaccgaggcgaatgttttgcaacggtgtcaggtgcgcttcgccgcgtaatgggttgtcatttttcttagcaacaagttgggcgattgttgaacgaccatcccccacgacattggctggaatccgttctaaaacagcctggaccttatgattcatcactaagaaacggtattccgaacccgcaatgaattcttcaactaaaatttgctgatcgtacgtttgtgccagtttaaaagcagcaatgaagtccgcttcacttggacgcgttaaaaatgtgctaatgcccgcccccatgttactgtgttttggtttaatgacaatcgcgcgctgaccaaacgccgcttgataatctgctactgccgtctctaaagcggtatattcggcacccgctggcacccgtataacatgacttgccaataaaattttagtcactaccttattatccactaacggcccactaattagccgatctaaactcgttatattcccatttttgactaattcatgatgatgttgataggtcagctcaataaattgttcatcgcgatccaaaacagccacatgcagccctttttggaaagcgtcaaacatcagcatttgtgttgataattccatatccgtgtatccctgtaactgatagggagtctctgtcagctcacatttaaaacgttttgcctgtttgagggcaaatgcctttagcgagtcctcttcaatcgcttgtgttaagcgataacttaaggtttgtcgatggtcctgaacacgctcattcatcactgtccaagcttgtttaaaacgctcattcagatgataatccgtaatgaattgggccaaatcggccatcacagtcttcaattgtgtttggagctgcgatggccgcagcggattctctaatgctactgtgtcatttaactgacgacccgtctgaatctgagtggctaaatcaccggataatttcggcaaggataataagtacataaagaataagtgtaagaagtctagctgttgttgatcaatccccgtcgcagtatacgggttaatatcaaacccccgaaattctaaataatccacaccagtctctaacatctgatccaatgagtgactccgtaaccgcacagttccgtaaaattcgcgttctgaaattaagtcgccattagcaatcgcttggcgcattgaatcaacatatgcggcaactgaatcaaaatgaattaataattgcttattgctgtagccgaataattcactcgagcgtaaactccgtacagggtgttctggtaatttcgtcatatcttctaaaaagcctggttccgctatcggactcgcaccaaataaatacgttaaaacatagtgataacgcacgtaattttgcgcaatctggatgtacaacgcatcgctaaaatcttttagactcacatagtgatcatgatagtattcatcaaataaacgcacaattaacgtcgatgacaggctaaaattataatggatgccagagaccatctgtagacgtcgaccgtagcgcttcgtcaaatagtcacgataggcctttaccgccggtgtgtattctgaaattggaatggttaattcatcgtctggtaacaacggtggcatactgaggggccaaatatattccgaatcggccatacttgattgcaatacttgttcgagcgctaataattgttgttggacatctacggtctgttcgaaggtatccgtaaccagttccgtttgcatctctgcaaaatcagtcgcaatgtatggatgaaacgttcgcgatcctaactcactggggtgcggttgttgactcaatgcgcccaatccggtcactcgctgcccctctttttcgaccccaaaagcaccttggttcaataaaggtgttaagcgtaattgtttaatgttctcaaataattgattaggcattttgaaacctcttcttaattcagtcttatacaactcattatacacatccctaaaaccttttaaaacgataatcactacgaatttgcgcgacatgttatactaggaacaacctaaacattaaaggatgaacgctatgcaacaacctctcgcatttcgcatgcgtccgactaacatcgatgaagttgtcggtcagacgcacttagtggggccgcaaaaaatcattcgccgaatggttgatgccaaactcctctcatcaatgattctctacggaccgcctggtactggtaaaacgagtatcgctagtgccatcgccggtagtacccagtacgcttttcgcatgctgaatgctgccactgatagtaaaaaagatttacagattgtcgctgaagaagccaaaatgagtggcaccgtgattttactcctcgatgaaattcaccgcttggataaaaccaaacaggattttctcttaccacatctagaaagtggccgcattatcttaattggtgcaactaccgaaaatccatatatcagtatcaaccctgccattcggagtcgggcccaaatttttgaagtcaagcccctcactgaagccgacattcatgtcgccattcaacgggcactgacagataaagaaaaaggcttaggtgcactagccatcaatctcgatgaaacggctgaacaataccttgcccgcgtcacaaacggtgatttacggagtgctttaaacgccctcgaactcgctgctcgttcaacaccagcgaatccagacaccaacgtcatcgacatcgatattgacgttattgaagaatgcgtgcagaaaaaagccattactcatgataaagatggcgatgcccattacgatgtcatctccgcctttcaaaaatcagtccgtggcagtgacgttgatgctgcgctccattatatgggccgtttgattgaagccggtgatttaatgtcgattagtcggcgcttgatgacaatggcctacgaagatatcggcctcgccaaccctcaagcctgtgcccgtacagtcgaggcaattgctgcggctaaacaacttggttttcccgaagcccggattccactggccgtagcagtgattgatctctgcttatctccaaaatcaaattcggccatcaccgcaattgataacgcgttagctgatattcgcgctggaaaagccggtgaagtccccgatcatctccgtgatgcccattatgcaggggctgaaaaacttggccacggtgtcgactacaaatatcctcataattatcccaacgactgggtcgcgcaagattacctaccagataagctcttaggtagtcattattacgaagcaaaagcaactggtaaatacgagcaagtcctcaaacaacagctagaacgcttgcgccaagccagtccgcataagtgaacggttacaaaagtgttgtgttaacatcacgagcgtgctactataatagtaggatttctaaggtgtgcgcgtcttcccaccttatgttgaccgatcaagtaattcgttaatgggacggatgagttattagcgagtgtagactttttcgcgaaggaaccaagtctaataataatctgacccacctgcattttctagcgggctcaactatcgggaagcatctacggcaccactagatttcccaaagtccaacgactttgaccgggctaacgtttacgttggcccttttttgttgattattttaggaggttgcacattgattcaaatcgccataatcgtttttttaatcattatcgccctacttggtgcgattttatgttactaccaagacaagaagttcctactctttgatttaactgaaaaccggtatttaggtcgattgatgtacttttcagggattgcgctcatcggtgtagcaatctgcggggctttgatttactggctattgccactagtctggacattggtgacgctcgttgctgccagtttaatcgccggcttagtcggccttagctttgcaactaacctttaagatttacttttgacactgaactagcgtacaataaagatgtaaaattaaatgaggtgatgacaatgttacaacaatacaagcacattttggtcgcaatcgatggttcttatgaagctgaactcgctttccgtaaagcagttgaagttgcccttcggaataacggacaactccacttgattcacgttatcgatacccgcgccttccaaaatatctctagttttgattccgcaatggttgaacaagtcacagaaacagctaagaaaacaatggacgaatacatcgtgactgccaatgaacttggcttaaaagatgttgactatagcattgaatatggcgcaccaaagagtttaattgcccgcgaagtacccgaaaagaaaaatatcgatctcatcatgattggtgcaactggtttaaacgctgttgaacgtctcttgattggttctgtaacggaatacgttactcggaccgccgtttgcgacgtgctcgttgtgcggacagatttagataataaacacgcactcaacaagaaacgcagtagcattggtcacgaagaagcataaattagcaatcaaaaagccgggacgcttatgtcccggctttttttagtggttaaccacttattcagccaattgttgatcaacttgcacaatgatctctggatgatgccggattaacgccaatgttttagcaaccgttaaatcctgtaaggcgttctctcgatgaagcgcatgttctgcacgaccaagaatgaaatacaatgcatcaagtaagtaaagactttgcttatcgattgcttcgtcaatcgcaagctgagcgtacttaatcgcaccttcataatccttcaattcaaaaagaattcccgctaagtgattataaatctgcaactcaacttggaaatcggccatagcaagtggatcagaattctccaacatttcaacggcttgttctgcataaatccgtacacgctctaaagcgcccttcatcaaataggacttgctaatgccgataatacatagaataccgtaaacatccgtctgagaaacaacgtattgattgaaggcacgattgaaaaagaaaagtgcatcgtccggtttattctccagcaataacttaatttgaccttggaaataataataccgtttgtaatcatctgctttgaccagtcgatctgtgtagatctgctgaatcaaatcacgtgcttttttgaattcattggtaaataacaatgcttgcacacgactcaacaagacgtgtaattgatcatcttcttgcacaatcactgagtccaacgtaatttcaagccgcttacaaatttccaagagaatctttgtgcttggcacctgttcttttttctcaattaagctaattgttgcttgcgtacaaattcccttagctaactccgcttgagacatcccccgtgctttacggatttgttttagtttatcccctaatattctcattttaaatactccaattacatcattatttaatttaaaattaatttccggaaaatataacccaattaagtaatttacatcaattagcaatgacgctactagttgcgtttattatacactatgaactagttatgtggcattacttatttttttatccaataagtattttacactacatactaaacattaccaaacatttatctttaattaattgttaaggtgctgttcgatagtacgacaaaaaaacggcttcctgcagcggaagccgttttttataacgttgctaatattgccggaacttcttttaatgattcaatttgataatccgctgccgattgatcaatcgcgaaaagtggatcaaatggttttaatgcgatgacggttaaaccagccgccttccccgcttgaatccccagtgcagagtcttcaatcgcaaccgcctcggttggttctaaatgcattcttttaagcgcttctagatacacatctggtgctggtttattatgcgcaatctctgcaccactaacaaccgtttcaaaataaggttctaacgcggtttccaacaacatttgttgaataattccgcgctcaccagcggacgccaaaccgatttgatatgtcggtgcaacggttgctaataacggttgcgcgtctgggttcatgatatttttaaaaacgattggatgagccgctttatacgacgtatagccgtttttaattgccgctcgttccaaaacagtatggtttggaaacaactgttttaaaacggcattcatattggaaccaatttgtttacgactttcctctgccgttagtcgtgcgccaattgcattcaaaaatgctaagcgttgttcaaaatagtacggttcactatccactaaaacgccatcgacgtcaaaaataatcccttttactgtcatcttctctcaatcctatctggttaattaaaataaatctgaaatcttccgtaagtaatccgcaattttatcaggtaattcaggttgtagcaacaatgactgtaaaaagcgattgcggttataccaccgattccaaaaaccaacggtatcctgtggtgccatagtcaacaatgaacgctgccactcctgtaagacgattaaacaataatcgacatagagttgatgcttgttcattaaactgattagaacgttcgtcagatgactatcttcaccatatgcgagtgcgttatcagagaagcgatacgcctgtagtacaattgccatcatcaaaatcttatccgcacgttggatttcaggtgtttcgttaagttctgaccagacattgatgatatgcgtcatcgcatgcgcccagcctttaccatcaacgtatcctcgtgaatctaattcgatgactgtataagccattactcgccgttcaattgccaataattcggccgtacttaatacatgataaaaagtgcggttagcatataaaatcccggccaaaaacatcgcgctaaacgaacgtaaaaaaacagcgtcattttcaggttctaaaatatgcgcgaataaataatcatcttgcaataagcggtccttgacccaaatcaattgggctggggttaaaaccgtctgccgtaataatcgattgaataagtaaaaaacacctttatcgcgcacttgcgaatctgggcttgcaagatgccttaataaatcatcgagctcttcatcgctgatggtcgcttctttgcctttggttttaattcgctcatcaattgctgtgattcgttgcaagactgactcgttgtcctcaggtactacgacatgtgtccgccgcgtcttatattggacgccatccatgacgaccaatactttttccggaattgattgatagatgtcccctttaatcaatgcactacgaatcgcgtctaactgttgcatcacattttgaacttccttcatcaatcatcacccactctctactgaaaacatctcataactaactattataatgcattcggccacagacataaactatcaatccttaaacaggcccacgatatgacaaaatcatcacctcgcttagaataaattccacctttagactgaatcaatgtaacttctagcttgatacgattaagacatcaattcacaaggagtgtcaatcatgaaaaaaatcattctattactgttctcacttggactaattgttatcggcggtccaattatcggatcagccacaactcagaatatgacggacggcaatgaccttgcccaacagtgggaccggttcaacctcttaatttccagagaagccgtctatgttaaaacagcacaccaatacgggacacaacaagcacatggcgattacctttaccggcaacctgcttaccgtgctgatggcagtcattacgaagtcgttttccaagcgccgcgcgcactaaaacctaatcactacttaaaattagatgccaaggggtgcttcgtcaattcttggactgccgtttcaaaatctgaattgcccgttaaactgcagtctagtctataattgtaaaatacaatcgaactaaatgctgttaattgcgaaatacaaacgagggatttcgcttttttcattgcttacatttaataagtatgctatattattcgcatgcactgataaaaacgatttcacaagggagtaatgaacatgacagaattattcgatttacaacaaacacgccggacaatttatgcacttggcaaaaacgtttcaatgagcgaagctgaattatcagaattaatcttcaacaccattaaagaaacaccaactgcttttaacgcccaaggttcacgcgccattattctctttggaaaagcaaatgaaacactttggaacgatattacagcaactgccttaaaaccattaacacctgcggaaaacttcccaagtacacaagctaaattggcttcattcgccgctggtgtcgggacaatcttgttctttgaagatcaagacgttgttaagaatcttcaagaaaacgtgccattatatgccgaaaacttcccaacatggtcagaacaagcttcaggcatggcacaatatgccacttggttagccctcgcagaaaaaaatgtgggcgctagcttgcaacattataacccagtaattgatgaagccgttactgcaaaatggaacattccatcaaactggaaacttcgtgcgcaaatgccatttggttcaatcgaaaatccagccgatgctaaagactacaataccgatgcaagtcgtttccaaacctacacaaactaattttaaaccgaatcgaccagagtgcgcatgcactctggttttttattttacccaacaaaaaaagcgactcgcatccgcgaaccgctttttactttaaggagaatgagagattcgaactctcgcgtgggcagaacccacctgacggttttcaagaccgttcccttcagccagacttgggtaattctccatatcaaatcttacaacgtttattataatatcaagttcgctaatcactgtcaagcctgttttttaaaaataactactatttacacccgtccaccaactcggtatcataaaggggtgcatttaaaatcaagtaaaactacttggactggttcggaaacttcccagaataaaaaactaaggatctcaaggaggttagaaataaatgcaaactcgcaaaatcattatcgattgcgatccaggcatcgatgacacgctcgctttgaatttggccattcaatcgccagcggtggaagtcgttgcaatcaccattgtttgcggcaacgttcccgtccaaatcggcgtggacaatgcctttaagtgtcttgaacgtctcgggcggctcgacattcccgtttatgttggtgcggataaaccgctccataaaccatttgtcagtgcgcaggatacgcatggcatggatggtttaggtgacagccatatcccgcgcctatccactattcaaccggcacaacaatccgccgctgattttttagcagccacttttagtcaaccgagcgatatcagtattatcgcactcggaccattgaccaatattgcgactgcgctccagcggaatccagatttaggtcggcactgtgcccgctttgtttcaatgggtgggacctataagagtcacggtaactgctcacccgttgctgaattcaactactggagcgatccggatgccgcactgttggtattcgaccaactcgatcaaaagattgaaatggttggcttagacgtgacccgcgaaattgtcttcacgccaacattgctggcttattgtcagcgtgtcaatcctgaagtcggcgactatctaaaagccatcacccagttttattttgattttcattggcaatatgaacacattatcggctgtgtgatcaatgatccattagcagtcgcctattttatcgatccaaccctttgtcacggctttgaaagttataccaccgtcgaaacaaccggcatcagcattggccaaacactggttgaccggttcgatttctggcaccgtcctgccaatagcctcatcttaactaaggtggacaccaatcgtttctttgaacagtttttgaccgtcgttttaaatgcacaagcaaccctcattaaaacggacttaccaaaacttagataaggaacctattatgcgaaaatttaaaacacaacacttaaccattctggcacttgccattgcactcaattacgtaggcgctaacattgccctatttttacggttaccaatctatctcgatagcgtcggcaccattttagccagcaccctattaggtcctctggcaggcgcattaactgccacttgcagtagcatcatcagcggtgtcacgaccgacttatttgcgctttattacttgccagacggtctattaaccggcttactcgctggatggttcttataccaccaccaacggacgaaacgcgagttaccccttgttgctttaggtgtcgccattcccggcacaattgtcagttcattaattacttacttcttgttccacggtatcacctcttcagggtcaagtttaattgtacaactactaagcggcttgggactaaatcagtttgtcagcattacactagttcaagccggtacggattatctggaccggctcttggcaatcattgtggtgacacaggtttgcgtccacctcaaacaaaaaatcaagacactctaatcaattaaaaaaaagcaagtgtgcttctaacatcaattagaaacgcatttgctttttttagttttgcatcagtaacgtgacatactgttctagataatctcggtcgacctcatcgtaagcgccaacgacgcggttatcaagatccaaaacaccgattagttgattagccttgatcattggcacaacaatctcagaacgtgcagccgaatcacaagcgatataattctgatgttgcgccgtgtcttctacaattaacgttgtttgctttgcggcggcttcaccacacacccctttacctagtgcaatgtgcatacacgagacgtttccttgaaatgggcctaaaatcagctcagcatcttgatacagataataacccgcaaaaacagtctccggtaatatttgatttaataacgccgaagaatttgctagattagcaattaaattcgtttcacctgccagcaaagcagcttgttgttttaagagcatttcgtaagcctcgactttagcttcttttgatttaaacatcacaatcacttcctcttttcaagctattatagtggaagcttgctgcgttagcaattcaaaacatcccttaatttcgacattaaaaaaaccgcacatcggcgatttttttaatgaaaaattgttttatttcttcgataaactgtctctggttcgccctcttcatgattgacgtaccgcgcaatcgcgtataaataatcagagagccgattcaagaaagttaatacagcttcgttaatcggttctacttcctgcaaggcgacgacttggcattcaacacgccgcgcaattgtccgacaatattgtagtttcgctgctgatggtactcccccaggtaaaataaattcttttaaagcaggtggaacatctgcatactgatcaatcttagcttctaaccatttcgtgtatgcgttgtctgtccgatacccccgcgaatcatccggcgtcgctaaatctgtcccacagtcaaacagaatttgttgaatctcaaccaattccattctcaatgccggataatcaggtaaatcactgatgacgacacctaagtatgaatttaactcatcaacacccccgtatgcttccacacgaattgcgtttttgcgcactttttgaccgccgataattctggttaatcccttgtcaccggtctttgtatatagtttcaatccgtagcctcctaaaactgtcatccactatcaattttagtgtaccacgtttgaaagcgaatttttggcgttgcttaatttttaacacttgtctgcttgtatcaatttaagtaatgcctcaattcgacggtacgaaacatcacatgtatcgccatttgcaaatatcacttgatgcgtctccttatcaatccgtacgactttgtccggattcactaggatactcttatgggctctgaaaaattgtggcaattgcgcttgaatcgtcacgattttccctacaaattcacttaaccgatgatcactgtgtaagaagacgtgccgtgctttatgcgctgtttcgaaataattaatctcttgaattgccactttttcaaacgataatccatcatcatattcaaaataagctggttcttcagctaacggcacctgttgttgtcgtaacttaatggcatcgttaatggttgcttgaatatctgcgcgaacctgcgccaacccgcgatccttcaaaataaaattcaaaacattaattcggcgttgaatggtttccattaaaagttcgtcatgcgttgaaacgaacgcaatctgtgcatatggatccaattcacgaattttaagcgccaattccatcccatccagcacgtcattctctaaatcaatatcaagaaagtaaacgcccccttgcgtttgactttcttgtaaaaaaattaataggtcatagccattcttagtcttcaaacgcacctgagcatccaatgtattttgttgaatatatgccgttataatctcttcataactatctagtaaaacctgtttatcatcacataaaaaaatatcaaccatgggtctcctcctgttcaacaacaagcattgcaacgaaatagtctccatcttgttttaacattaagctaaaatctgagcgcatatccgtgatttctttagcagttgtgagcccaagcccgcgattaatccccttcgttgaataaccagcctgataaagctgaccaaattctactggtgtattaatcatatttttgacacaatagaccatcttacccttttgctcgaataaactgacactgattgaaccatctttaatatcatttaccgcgtcaattgcattatccaaaaagattcccagaatccgtaattcatcaaaatactgttgttgttgcttaaataaatccggttgaacctctaaattaaagggaatccgattattatgtgcttcaatatacttgctaaaaataatgcctttaatataagcattattaatctcttgaaaccgtccaattgcctgatcttgaatcgtgtcaaagctataatgcgttagtaaatcatgaaaatcctgcattaaaactgggctcccttgttcattgataattgtctctaaagccaataaagcattggcgatatcgtggcgaaacttgcgtatttcacggtagttacgctctaactgttcaacatacagcgttagatttcgctgactttcttgttctacgttgattctattttggcgaatcacagctttcgtatacaaaagcattcccacaatcaccaaaactaatagtaatagcacaagtcctaacacaaggtacaaatattcaaccggcagattcgcatgcttaaagctatcaaaaagcaccatcactgccaccacaaataacgcgagaccggctaaaatcgtgccggccacgcacataccgtatgaagcaatggatgctttaataagctgatctaaccgttggacaattaatcctaatccggctgcaatcaataattgactcaacataattaaacacaccatttgccaattaaactggctactcatcagattatcaaggccctttaagtgagtatacccaattaaccccaccgttgttagaaccgatgatagcatcacgatgatgtaactaaagatggttgcgataattaacgcataacttgtctttaatttacgcagatttttaaagccatttaaccaaccatataatccaacagttgccaaaatcagccatagctcttcaagaaaatttccaattaataaatccattccctgaacaaaagcaatgccgactccaactgataatagtagttgaaatctgttcgttcgtttcaacttccccgtcaaaaataatactaatagtagaaacgaactaaacgtacttagattaatgacaatctgcattgccagcggcattttcattgccatgcataaaactccctactcgaaccttaattccaaaaccagaaaattaaattttgaatgttactcatcattatcatacccctcctttcatattatgaatacccatgattggtgactcatttcgattttatcacgtaatttttttaaaaggattaaatgtcataaacgtatacttgtctgcattaaacgtatataattaatcataaatatagataaataattactatttggaggctaaaaatgtttttaggccaattgatccatcaacagcgactcaacaagcaactgacacagtctgaattagcagcggggatttgcacgcaaaatacaatcagcaaaattgaaaagaaaaatctgccccccacaatcccaattctaattaagatttgtacacggcttggattgacattaaatgaacttttcaccgaatttaacgcgctcgacactgccagtgacgaaggcgtgatttctgcggaagttgctttattagcaggcgattctggccctgctgccgcattaattaccgatatcgacttcaaggcaaccgaacatccttatcccgccatcttcttctttttcaatggctatttaagttaccttgaccatcaatctgaattacagattttttccgcttataactcgttcacagcggccatcggtgacgacacttcaacgttgaagttacttctaaataccggtatgggtttaatttaccaagaagctggcgaggaattagctgatttttatttcaataataatatcaatttcatcaaccaacttgatcacatcaatgtcattgatgttcaacgcgtcctatttgcttcgcgtcacacagcagcctatatgattaaccaacaccgcattgatgcagctatcgagtttttgacgaaagccctcaaactgagtcaaaaaaatcaaatcatcaaacaagtcgatcatttgtattacctccgtgctcgggcgcgccaacaaagcggtcgagactatgcagaagatcgcgaaaccgcgttagtttttgccaaataccttaaaaataacgcgttaatcgctaaaattaaagcgttactggatacaaaaatattaataaaaaatgcggaagtagttcagtggtagaacatcaccttgccatggtgggggtcgcgggttcgaatcccgtcttccgctttttttgtacccgtaataaaatagtttccgggaagtagctcagcttggtagagcactacgttcgggacgtaggggtcgcaagttcaaatcttgttttcccgactctcaaagacttgttgatgacaagtctttttttgtgcgtccaattgattagctactaaaagtcagtaaactttcattttgtactgataatcgttataataatagtcaacgttagtcaaagttaaacttttgacactgaaaaacgcagaagactaaatgaaggggctgatatgtttgcaaagtcagaacatctcggatattattgaagcctatctaaaaaagatactggctgacaatgaacaaatcgaaattagacgctccgaaattgctaagctttttaattgtgtgccgtcccaaattaactatgtgattaatacgcggttcactgagcagcgcggttatgtcgtgaatagtaagcgtggcggcggtggttatattcggatcgtcaaggttcaatttctcgatgatcgggactttttagaagcgttaattgaaaatgttgatacgcagatttcccaggcggacaccttagccattatccagaaactatatgatgaacaaattctttcgcaaaaggaaggcaatttgatactcgcggcaacgagtccacagacattagcggttaataataaacaattagaagagcagcttcgagcacagattctagttgcagtgttagaacgactacgatatgaaattaagtaaagagtgggggattatccatgaataatctatttacaccaagtgcaaaaaacgtcttaatgatggcacaagaacaagcaaagaaatttaatcaccatgcactaggaacggaacatctcctattagcaatcgtattagaaaatgagggaattgctgggactaccttacgcgaattaggtgtcaattcgaccgatgtccttgaagaaattgaacgcttaaccggatatggcgatgctgtaatcgcttctggcattggcggttatttaccatattcgcccaaagccaaacaagtactcgatattgctcgggttgaagcgcaacaagctaattcggttaaaattggcacagcacacctattattagcacttttacgtgatgatgatattatcgctgcgcggatcttattgaacttaggacttagtttagctaaaacacgccaactactacttcaaaagatgggtgtggatacggcaaccgctaaaaaacgggctaaagcagctaagaataatgccgatcaagctgggacaccaacgttgaaccaattagcgcgcgatttaacacaacttgctcgtgacaatcaaattgatccggtcgtgggtcgtgatgaagaagttcggcgacttgtgcagattttagcccggcgttcgaagaataatcccgtcttagttggtgaacctggtgtcggtaagacagcgattgctgaaggttttgcgcaacgcatcgtcaatggcgatgtgccaagtgacatgcagcaaaagcggctcatgatgctcgacatggggtcattggttgctgggacaaagtatcgtggtgaattcgaagatcgtttgaagaagattatcgatgaaatctatgcagatgggcaagtgattctctttattgatgaattacacaccctcattggtgcaggtggcgctgaaggggcaattgatgcttctaatctcttgaaaccagcattagcgcgtggtgaattacaattaattggtgcgacgactttagatgaatatcaaaagtacattgaaaaagatgcagctttagagcggcgattcgcgaccgtcacggtcaatgaaccaacgccagaagatgcggaacaaattttaaagggattacgtccacgttatgaagctcatcatgggattgcaatttcagatgaagctttacatgaagcggttgtcttatcaaatcgctacatcacgaaccgattcttaccggataaggcaatcgatttaatggatgaagcgacggctaaggtgcgcttggatgctgttaaccagaagacaccgtcggataaattagaacaaaaactacaaactttaaatgacgataaagaagccgctgttcgcgcgcaagattttgaaaaagcggcgacgattcatgagcaagaagtaaccactaaggccaagattgccaagttacaagctgccgaacaagaaaacggtgttcgcagtgacattcaagtgactgctgaagacatcgctcaagtggttgcgcaatggaccggtgtgcctgttactcagttgcaacgcaaagaaagcgaacgtctcatgcaacttgaaaaagtcttgcataaacgggttgttggccaagaagaagccatttctgccgtttcacgtgcgattcgtcgtgcgcgcagtggtttgaaagatccaaaacgaccaattggttcatttatgttcttaggcccaaccggggttgggaaaacagagttagccaaagcattggcggaagccatgtttggttctgaagacaacttgattcgggttgatatgtctgaatatatggaacgttacagcacgagccgtttagttggggcggcccctggctatgtcggctacgaagaaggcggccaattaacagaaaaggtccgcaataaaccatattccgtcattttatttgatgaagttgaaaaggcccaccctgatatcttcaatatcttgttgcaagtcttggatgacggctatttaaccgattcaaaaggacgtaaggttgatttccgtaatacgatcatgattatgacatcaaacttaggtgcgacagccttacgtgatgataaatccgttgggttcggggttaaagatgtaactgctgattataaagcaatgcaagggcgcattatggaagaattgaagaaagctttccgtccagaattcttaaaccgaattgacgaaacggttgtcttccattccttaacacaacctgaattgcgcgaaatcgtgaagattatggcgaagaatgtcttgggccgtttagcggaacaagggattcaaatcaagatgacagctgcagcgatggatgttgttgccaaagctgggttcgatcctgaatatggggcacgaccaattcgacgggcgctacaaacccaagtagaagatcagttgagtgaagcgttgcttgctggcgagattacgatgggtgtaccggtgacaattggcgcaactaaaggtaaaattaccattaccagtaagactgataaagtaactgtttaaacgtaaataaggtgtcagaccaattggtctgacaccttatttttttgccctaaaagggtcgtgagctgttcaatttcagttttaatcgcagcgccgatattcgtttgactgacacgttgacgttgactaacttgatcaatcactcgacgcgtggaaataatgtcttgcatcttggcaattgcattggctcgtgtggtgaacggctgatgggtgactaactgcattccatacgaattgtacaggagcgtaaagccaccaatgccagttgtgtggtgataagcttttgaaaagccgccatcaatcacgatcattttgcgattagccatgattggattgtggccttttttgacaggtgtgtgaccattgagaatgtgccccgtttctggcgttaagccaaactccaacaagagtttctcaatgaagtcttcctgatggcggagttggtaatatgcgttcttcttttcttcgtgtaaaacggggtcggcgctgaagtagcgttcgaaggtcgtcatcgcgttcttgccaaatagtggggagagcggtcctgtccacaggtaccagagtaaatcggtggataaattatcttgattgagcgggtggtcgaagctcattcgaatttggtgatcgaagaagtcgagtaatgatttaccagcgtattgtcggttagcgagggttaacgtgaggaagttgccggcttcatcaactggaatacagccgtgaaaaaggagattctggttgtagagttggtacatgttaccgttgtcgattaaaaaacggagatgcttgcgtagtttttggcagtgggtaaacgtgtttagcaatgatgtaacaatggctgcttcatcggaagttaatatttcggggtgtgtggggtcgattgtttgaaagcaggtgttatcaagtgggtagtcatgaccatttagatgaattgtctgctgttcaaagtcaacatggctgaggattaagcggtggtccattttgaaatcaggattgcgtttaatcacggtttgttccaacttaaactgcatgatggcgatggcttggtgcacttggttgatgcttttcttttcagctgttgagattgcgggttgattggcagcaacctttggttcgaaggcgggattgggctgataagttcgttgggcaaactgaaccagttcgctaaggtcaattccgtaagctttctcgatgatggctaaattattgtagcgtgcgcaaatgcgtaaaaggttgagcatacatagttgagaaccgctagcggcgccgaaccagagaatatcatgattgccccactgaatatcaaccgcagggagcttggtgagttgttcgacaatcagatcgggacgcggcccacgatcgtaaatgtcaccgatgatatgccaatgatcaaccactagtcgttgaatcgtatgactggtggcgataattagggcatcggcttggcccatcgaaatgatggacgtcgtgatttcttggaagtagcgtttcttatcactgttagctacatcgccgtacattaattcttcggtaatgtagacgaaatcgggcgccattgctttacggacttttgagcgtgtgtattttgtggagacaaattttaagaggtcgattaaccgtttaaaagtggtgaggtaccactggtcgagttcactagcagatagttgtgcgtgtttgagtgcaagccgctcagttgggtagtaaactaaaaaagcgaacgcctgcattgtatcttcagtcatttcaccggaaaagacctctgtaattttttgccggagattccctgcgccagtgcgaatgagatgctggaaggcatcatattcgccatgtaaatcactcatgaaggcttcagtgggtttgggaaggttcaagatggcctttaagttgatgatttcggaagtaattgccattttagtggggtatttttcggataacgttttcattttgttgttaatcattcgccgagctcctttgataaactaatagttcgattataccaatcgtaaatataaatgcaaattactttgtttaaaaacattttattagtatataccaattaaaaaagtcgcgcagtttagcgcgacttctggaaactattgatcttggatggtgccatcaacgtggcgttcaactttcatttgcgtcattgggatgtagcccagtttagggacgattgtcttttgaacgtcttttgattggatgaagtggatgaaacgggctgtttgatagttaggtgcgcccttagtatacatatgttcgtaagaccagattggccatgcattggttgaaacgttcttttcggtaggttcaacgtcgtttaacttaacagcttgcaagttacctttgatgtatgggaaggcgaggtaactgatagcgcctggcgtttgttcgacgattttttgaacagtcccagaggaatcttgttcttggctggtaacaactttgtcggttttaagacctaatttttcaaacgtttgacgtgtcccacttccttgggcccggttgataacggtgattttttcgttaggaccaccaacggtttgccagtttgtgatttcgcctttaaagatgcctagcaattgtgcactggttaaatttttgatgcctaactttttattaacaacgggtgcgattgcaaccacagcaactttgtgatcaaccagtttcttagtatcgataccatctttttcttcagcgaagatgtccgagttaccgattgtgacgttgccaccactaatttgggttaaaccagttcctgaaccgccaccttgaacggtgacgttgactttagggttatccttttgatattgatcgccagcttgttcaacaaggggttgaagggctgtcgaaccaactgcagtaattttagcgccttgatcctggctttgacttgcactttttgattggccttgacaaccagctaataaaagagcggccgcgccaactgtgagtaatgccatactaatgcgtttcataatgattcctcctgaggactgatttaagggtacaagttcagtatagagacgtcgtgtaaagattgaccgctaattcgtgtaaaaaacgtaaatgataagtcgcgagtttgtaaatgattccgtgaggggcttgaagattgtatggctgcttattgtgccaatcgagctattttagcgccaattgaatgtgcagaaaagtcgggctattatatggaagtaaaagaacattatggacgctaaattaagggatgaataacccgaggcagattattgacttttagtagtaaaagaagtatattatacagtaactgcgaaaatccgtagaaaaatttattgtgctgatctattgtccagcacggtattcatgaaaaacaaaaatagttagtctgatttattcagcttaaaataactgtttttgttttttttctgctcaaaattacctaaaaatggcgatgtaatattttcttaatatttgtcatatttttgtaataatgaggctgcggaaaacttatagaggggtgaacaatttggcaggacacttagtgaattacggtaaacatcgtactcgtagaagctacgcacggattaaagaagtgctagaactaccaaacttgatcgagatccaatctaattcctatcaatggtttttagacgaagggcttcgtgaaatgtttgatgacattatgccaattgacgattttgctggtaacttatcattagaattcgttgattaccaacttcttgaacctaaatacacggttgaagaagctagacaacatgatgccaactactcagcaccattacacgttactttgaaattaacaaaccatgaaactggtgaaattaaatctcaagacgttttctttggggacttcccattgatgactgaccaagggactttcatcatcaacggtgctgaacgggtaattgtttctcaattagttcgttcaccaggcgtttatttcaacagcgctgttgataaaaacagccgcacaacttatggtacaactgtcattcctaaccggggtgcatggttagaatttgaaacagatgctaaggatattgcatatgttcggatcgatcggacacgtaagattccaatgtctgttttagttcgtgctttaggttacggttctgatcaagaaattatcgatatcttaggcgacaacgattcattaatgttgacgttagaaaaagatatccataagaatactgacgactcaagaacagaagaagctttgaaggatgtctacgaaagacttcgcccaggcgaaccgaagacagctgatagctcacgttcattactttatgcacgtttcttcgatgctaaacgttatgatttagctgctgttggtcgttacaagatcaacaagaaattaagcttaaagacgcgtttattgggtcaaacattagctgaaacacttgctgatcccgatactggtgaagtgattgctgctaaagatacagttgttgatcgtcaagtgatggatgctttggcaccatacttagacaaagaagacttcaagacggttacttaccaaccatctgatgaaggtgtcttaccagaaccaatgacactccaagtgatcaaagtgtactcacaaaaaacacctgataaagaaatcaacttaatcggtaacggtcatatcgatgccaagattaagcatgtcattcctgctgatatcatcgcttcaatgaactacttctttaacttacaagaaggtctcggttcaacggatgatattgatcatttagggaatcgtcggattcgttcagttggtgaattgttacaaaaccaattccgaattggtttatcacggatggaacgtgtggttcgtgaacggatgtcaatccaagacacaagcaccgtgacacctcaacaattgatcaatattcgcccagttgttgcctcaattaaggaattcttcggttcatcacaattgtcacaattcatggatcaaaccaatccccttggcgaattgacgcataaacgtcgtctatctgccttaggacctggtggtttgactcgtgaccgtgccggttatgaagttcgagatgttcactatacccattatggtcgtatgtgcccaatcgaaacccctgaaggccctaatatcggtttgattaacagtttggctagttacgctgttgttaaccgttacggcttcatcgaaacaccatatcgccgtgttagttgggatacgcatgatgttactgataagatcgactatttaacagccgacgaagaagataactatgtcattgcgcaagccaactcaccattaaacgatgatggttcattcgttgatgatactgttttagcacgttacaaagatgacaatattgaaacttcaatcgacaagttagattacatggacgtttcgcctaagcaagtagttgctgtcgctacggcctgcattcctttcttggaaaatgatgattcaaaccgtgccttgatgggtgctaacatgcaacgtcaagctgtgccattggttgacccacatgcaccacttgttgggacagggatggaatataaagcagcccacgattcagggattgctttattagcacaacatcccggaactgttgaatacgttgatgcgaaagtcattcgcgttcgtcgtgaagacagctcattagatacgtacgaattaatgaaattccgtcgttcaaatgctggtaagaactacaaccaacgtccaatcgttgcaaaaggcgatcacgttgatgttgatgaaattatcgctgatggaccagctatggaaaaaggtgaattagccttaggtcaaaacccattgattgctttcatgacttggaatatgtataactacgaagatgcgatcgttctttcagaacgtttagtgaaagaagatttatatacttcaatccatattgaagaatacgaatcagaagctcgtgatacaaaacttggacctgaagaaatcacacgcgaaattcctaacgttggtgaagattcattgaaggatcttgacgaattcgggattgtccgtgttggtgctgaagtcaaagatggcgacattttagttggtaaggtaacgcctaagggtgtgacagaattatcagccgaagaacgcttattgcacgctattttcggtgaaaaggctcgcgaagttcgcgatacatcattgaaagtacctcatggtggcggcgggattatccaggacgttaagatctttacgcgtgaagctggcgatgaattgtcaccaggtgttaacatgatggttcgtgtttacattacacaaaaacgtaagatccaagtcggcgataagatggctggtcgtcatggtaacaaagggactgtttcaatcgttgttcctgaagaagatatgccatacatgccagatggtaccccagttgatatcttattgagtcccatgggtgtgccttctcgtatgaatatcggacaagttcttgaattacatcttgggatggctgctagaaacttaggcatccatgttgcaacaccagtctttgatggtgcgcaagataaagatttatgggacgctgttcgtgaagcaaacatgccttctgatggtaagagcattctttatgatggtcggaccggtgaaccattcgatacacgtgtgtcagttggtgtcatgtactacatgaaactagcccacatggttgacgataaactccatgcacgttcaatcggaccttactcacttgttacgcaacaaccattgggtggtaaagctcaatttggtggccaacgtttcggtgaaatggaagtttgggctcttgaagcttacggtgccgcttataccttacaagaaatcttaacttacaagtctgatgacgttgttggtcgtgtgaagacatacgaagcaatcgttaagggtgaaccaattccaaaaccaggtgttccggaatcattccgagtattggttaaagaattacaatcacttggcttggatatgaaggtcttggatatcgataatcaagaaattgaattacgcgatatggacgacgatgatgatgatatcgaaaacatcgatgcattatctaaatacgctaaagaacaagaagccaaaaaggcacaagaagaagctgaaaaagcacaagcagcaaatgctgatgcagtagatccatctgctgaataaagcgtgctataaattatgaggaggtcggccctttgatagatgtcaataagtttgaaagtatgcaaattggtttagcatcttcagataaaatccgtagttggtcgtatggtgaagttaaaaagccagaaacaatcaactaccgtactttaaaacctgaacgtgatggcctttttgatgaacgaatcttcggacctacgaaagattgggaatgtgcttgtggtaagtacaaacgaattcgttataaaggaattgtctgtgatcgttgtggcgttgaagttacacgttcaaaagtgcgtcgcgaacgcatgggacatatcgaacttgcagcaccagtaacacatatctggtactttaaagggattcctagccggatgggtcttgtcttagacatgagccctcgtgcattggaagaaattatttacttcgcatcatacgttgtgattgatccaggcgatacagccttagaaaagaaacaactgatgaccgaacgtgaatatcgtgaaaaattagatgaatacggtaatcgttttaacgctaagatgggtgctgaagccatcaaagaattgttacgtgacgttgatcttgaaggcgaagttgctgaattaaaggaagacttgaagtcagcacaaggtcaaaagagaacgcgtgctatccgtcgtttggacatcttagatgccttccgtaaatcagggaataaccctgaatggatggttatggatgctattccagttattccaccagatttacgtccgatggttcaattggaaggtggccgttttgccacatctgatttgaatgatttgtaccgtcgtgtgatcaaccgtaacaaccgtttgaaacgtttgttagacttgatggcaccaagcatcatcgttcaaaacgaaaaacggatgttacaagaagccgttgatgctttgattgataatggtcgtcgtggccgtccagttactggacctggtaaccgtccattgaagtctctttcacacatgttgaaagggaaacaaggtcgtttccgtcaaaacttacttggtaaacgtgtcgattattctggtcgttccgttatcgatgttggtcctacattgaagttctatcaatgtggattaccacgtgaaatggcacttgaattgttcaaaccattcgtcatgcacgaattagtgaaacgcgatatggcttcaaacattaaaaatgcaaaacgtaaaattgatcgtcaagatgacgatgtttgggatgttttagaagatgtcatcaaggaacgcccagttctattgaaccgagcacctacattgcatagacttggtatccaagcattcgaaccaatcctggttgatggtaagtcaatccgtcttcatccattagcttgtgaagcttacaatgccgatttcgatggggatcaaatggcgatccacgtacctttatctgatgaagcacaagcagaagcaagaatgttaatgcttgccgctcaccatattttggcaccaaaagatggtaaaccaatcgttacaccttctcaagacgttgttttagggaactactacttaacgcttgaacaaaaaggtagtctcggcgaaggcatgatcttcaaagatacaaacgaagttttaatggcttatcaaacaggtcacgttcatttgcacagtcgaattggtttgtcagttgttgatatggataatcgtccattccctgacgaacaacgccacaagattatggtaacaagtgttggtaaagtgatgttcaacgaaatcatgccaactggcttcccatatttgaacgaaccaacaacagataacttgatgaatggtgtgccagataaatacttcatcgataacggtgaagatattcatgactacctctcaagtgccccagtgatcttaccatttaagaaaggcttcttaagtgatatcatcgcgcaagtcttcaaggtatataaggttcaacggacatctgacttattggatgatatgaagaccttaggttacgttcaagcgacccatgctggtttaacagttggggttgccgatgttcctcaattacctgaaaaacaagaaattgttgatgaagcccataagaaagtcacaacggtttctaaacaattccgtcgtgggttgattacagatgaagaacgccatgcgcgcgttattgaaatctggaacgatgctaaagacgatatccaacaacgactcacagattcgtttgatccaacaaacccaatctcaatgatgtctgattctggtgctcgtggtaacatctctaactttacgcaacttgctggtatgcgtgggttgatggctgctcctaatggtgggatgatggaagttcctgttacatcaaacttccgtgaaggcctctctgtcatggaaatgtttatgtctacccatggtgcccgtaaagggatgactgatacggcgcttaagactgccgattctggttacttaacacgtcgtttagttgatgttgctcaagacgttatcattcgtgaagaagattgtgggactgatcgtggtcttctcattcactcaattcgcgaaggtaatgaattaatcgaaccattgtatgaccgtcttgttggtcgttgcgcaatgaagaccattgttaacccaacaacgggtgaagtgatggttcaacgtaaccaattaatggatgaacaacttgctcaagctgttgttgatgccggtgttgaagaagtcacaattcgttctgtcttcacatgtaacacaaaacacggtgtctgcaaaaaatgttacggtcgtaacatggccaacggcgaagaagttgaagttggtgaagcagtcggaacagtcgcagctcaatcaatcggtgaacctggtacgcaattaaccatgcgtaacttccataccggtggggttgccggcggtgaagatatcactcaaggtttgcctcgtatccaagaaattttcgaagcgcgtaatcctaaggggcttgcaacaatcactgaagtaactggtgaagttgttgcggtggaagaaaaccctgcagaacatacacgtgaaatcactgttcaaggtgaaacagatacacgttcatatagtgtgccttacacagccaacgtcatcgttaacgaaggcgacatggttcgtcgtggttctaagttaacgggtggttctgttgatcctaaacaattaattaaagtccgtgacgtcttatcaactgaaaactacctcttgcatgaagttcaaaaagtttaccgtatgcaaggtgttgaaatcggcgataaacacgttgaagttatggtccgtcaaatgctacgtaaagtccgtgtcatggatccgggtgatacagaaatcttacctggtacattaatggatattagtgaatttacagaccgtaaccacgaaaccttaattagcggtggcgtacctgctacttgtcgtcctgtcttgcttggtattacgaaagcatcattggaaacaaatagtttcttatcagccgcatcattccaagagacaacacgtgtcttaacggatgcttctatccgcggtaagagcgatccattacttggtttgaaagaaaatgttatcatcggtaagattgtcccagctggtactggtatggcgaagtatcgtcatatggaacctaagacagtcggcgctgtatcagaaaatgtctactcaatcagtgacatcgaagcacagatgaaagaagaaacaaaagaataactgagtgccaatttagaacagttgctctaaattgcacgttaaagggcctcaccgacatggtgaggcccttttttatgtgtttgcaataaacaaaacgattaagacaccgtagctgatatacgggacaaatggaattgggcggcgtccgactaaggcgaggacaactggatggtggagactatcaatgagatatttgattaaacagaggagacaggcaattaataacatggatagggtgacctccaatccaaaccacaacccaagaattgccaataattcaatgtcaccagtaccgatgccatctgaaaagtagttgatgacagataaggtgctgccaatcaatagggcactgagccaatggtttgtcggccagtagtcaataaacaaaggcataaaagccagtaccattggaactgggtatagagctgtatggaaaatatcgactaggctcaacaaataaaggataagcaataaatagccaatctgtggtgtgaaatattgactggctaaacaacacgctaacaagccgccaataacctcactagtaaaaaaatggtgctggattcgagtatcacaatagcggcagtgccctctgagaatgaggtaactgataattggacataagtcgtaccaagcgagggcgtgatggcagaagtcacaccgtgaaccaggccatgtgatggataaaccgagtggccaacgccaagcacaaacagttaaaaaagaggcgcaacacgcgccaataacaaaggttaaaaaatatattaacaaacgtgtcatctcctttatgataactacaaaaaaagggcgcaactttttctgaaaaactggcttatagcacgttgactttcgtagttgtgcatgctattcttgtagatgtgctttttacggaagttttctgatattcagacatgctgactgacgtctaaaaatgcattacaatccacgcaatctaggttgccatttttttatcgcaaaaaaagaaccacctggatgtgtggacttaaaactcaaaaataactttcagatcaaggaaggaggaaccttcaaatgccaacaattaaccaattggtacgtaagggtcgtaaatcaagaacttcaaagtctgatgcacctgcattaaactttggctacaacagtatgaagaaaaaagctacagataatccagcaccacaaaaacgtggggttgctactcgtgtgggtactatgacacctaaaaagcctaactctgctttacgtaagtatgcgcgtgtgcgtttatctaacttaatcgaagttacagcttatattcctggtattggtcataacctacaagaacatagtgttgttcttatccgtgggggccgtgttaaggatttacctggggtacgttatcacgttatccgtggtgctttagatactgccggtgttgacggtcgtatgcaaagccgttctaagtatggtactaagagacctaaaaaataacacacaaaaaaatttgaaaaagtcgattgaagtttaaatgacactgtgtgttacttcaaggacttaaatatcttgaggaggttatcaggatgccaagaaaaggctatgttgcaaaacgtgacgttttacctgatccaatgtacaattctaaattggtttcacgcttaatcaaccgcttaatggttgatggtaaacgtggtactgcgtcaacaatcttatacgatgcatttgatattattaaagaagaaactggtaatgaaccattagaagtgttcgaagaagctatgaacaacatcatgccagtacttgaagttaaagctcgccgtatcggtggttctaactaccaagtaccaattgaagttcgtccagaacgtcgtacaactttaggtttacgctggttagtaagctatgctcgcctacgtggggaacataccatggatcaacgtcttgcacgtgaaatcatggatgctgccaataacactggtgctgcagttaagaaacgtgaagatacacataaaatggctgatgccaaccgcgcatttgcacattatcgctggtaagattaacaaggttggctgttatatgtattcaaatcatataatggcctcttgttgtatatagcttaatattcgagaggagtaatattcacttatggcaaacaaacgtgaatttccgttagacaaaacgcgtaatatcggtatcatggctcatattgatgctggtaagacaacaaccacagaacgtatcttgtactacactggtaaaatccataagatcggtgaaacccacgaaggggcttcacaaatggactggatggaacaagaacaagaacgtgggattacaattacatcagctgctacaacagctgaatggaaaggtaaccgagttaatatcattgatacaccaggacacgttgatttcacaatcgaagttgaacgttcattgcgtgttttagatggtgcaatcactgtcttagatgctcaatcaggtgttgaacctcaaactgaaaatgtttggcgtcaagcaactacttatggtgttccccggattgttttcgttaacaagatggacaaacttggtgctaacttcgattactcaatgacaacattggaagatcgtttacaagctaatgcacatgctgttcaaatgccaatcggcgctgaagatgaattccaaggcgttattgatttgatcgaaatgcaagctgacatctatgatgaagatgaattaggtgctaagtgggatacagttgatgtacctgctgactaccttgaagaagctacaaaacgtcgtgccgaattagttgaagctgttgctgatgttaatgacgacattatggacaaatatttagaaggcgaagaaatttctaaagatgaattgaaagctgctattcgtcaagcaactatcgatttgaaattcttcccagttttcgctggttcagctttcaaaaataaaggtgttcaaatgttaatggatggtgttgtagattacttaccatcaccattagacgtacgtccttataacgctaaaaacccagaagatgattcagaagttgaattgatggctggcgatgacaaaccatttgctggtttagcatttaagattgctactgacccattcgttggtcgtttaacattcttccgtgtttatactggtacattacaatctggttcatacattttgaatgcaactaaagacaaacgtgaacgtgttggtcgtttattacaaatgcattcaaatcaccgtaacgaaattcctgaagtattctctggggatatcgctgctgcaatcggtttgaagaatacaacaactggtgattcattgactgacgttgatcatccattaatcttggaatcaatggaattccctgacccagttatccaagtttctgttgaacctgaatcaaaagaagatcgtgataagttagatcttgctttacaaaaacttgctgaagaagatcctacattcaaggctgaaaccaacaatgaaacaggcgaaacgcttatttctgggatgggtgaattgcatttggatatcatggttgatcgtatgagacgtgaatttaaagtggttgccaaaattggtgaacctcaagttgcttaccgtgaaacattcacaaaacaagcatctgcacaaggtaaattcgttcgtcaatccggtggtaaaggtcaatatggtgatgtttgggttgaatttacacctaacgaagaaggtaaaggcttcgaattcgaagacgctatcgtcggtggtgtggttcctcgtgaatacatcccatcagttgaacaaggcttgaaagaatcaatggcaaacggtgtcttagctggttacccattgattgacgttaaagctaagttatatgatggtagttatcatgatgtcgattctaatgaatcagcatttaagattgctgcatcaatggcattgaagaacgctgctaaacaagctggcgctgaaatccttgaacctatcatgaaggttgaagttattgctcctgaagaatatcttggcgatatcatgggacaagtaactgctcgtcgtggtgctgttgaaggtatggaagcacgtggtaatgcccaaatcgttaatgcaatggtaccattgtcagaaatgtttggttatgcgacaacattacgttcagctacacaaggtcgtgggacatttacaatggtatttgaccactactcagctgttcctaagagcatccaagaagaaatcatcaagaagaacggtggccaataagccgctaatcttaagtgattggtttcgattggaaaaggactcgtcattgcgacgagtcctttttttgtacgtaaaaatgcgattttacagtttcgtaaatgaaagttcatatttaattcataactggttggtattctgtatacatcagatgaattcctcccaagaaataatctgaaaaggtaaaaatgcttttcaaggtggttagcttttgagcataacatagcgaggataatgagcaacgaaggtgatcgttgtcttcgcgtagttaggtggaaaaagttaccttgaaaagcaagattaaatgaattttcattagacaattcctccctaaagaatccgtctaagtaaagcaccgccaatgagttatagtttaatggtaaaacgaaccggcccatttgaaattcctcccaagaacagtgaatggttttctggtgattgatagagacttgctttcgaaggcgcaaggatttgttgatcattaagactggttcatgcgggttcaatccccgctaactcgatttgccaccgccctggcaaaaaaactcaaactctttttcatataaacttctccaaaaaagggagttacgacaaaaatcacttttgtcgtaactccctttttgtgtttctaggcacggcttactgagttagttttgttttgtaggacgtgttttcaaactgcccatcagacgtttaacctttgcttgttcgatttcgcgggcggatagttgactatagtccgcttcgatagccagtttattgaaatcagctagccgttcaggcattaatgaacctgcatcgattgcggctcgtacggcgcaactgggttcgctttgatgctggcaatccttaaatcgacagtcctgtgcgagcgtctcaatatcagtaaagactgtcttgagtgccttagacatgctacttgtcatgccgagttcgcgcatgccaggagtatcgacgatgaaggccccgctagcagtttgataggcttgtcgattggtggttgtgtggcgccccttatcatcgtcagcgcgaatgccgctcgttaaaacggaaggctctttaatgagctggttgatcagggttgatttaccaacgccggatgagccgacaaatgtcacccattgtccagctgttaaatacggtttgaaagtcgctgcaacatttgatgccgtctggccagttgtgatgacgggaacgctgtcgaatgtcacacttgcgatggcgtcaagaaaggttgttagctcagagtcgctgactaaatcggttttactcaaaacaatcaccggtgttgcgccgctatcccaagccatcgttaaatagcgttgtaagcgcgcttcgctgaattcttgattggcggatgttacgatgaaaatcgttgcaatattggccgctaaagtttgaatccatagaatgggtacattgtcccgtcatttaagatagcagatgatcgttaaaagtcaaattagataattgtagctccgaggctgtttttaaaatgcgcgagtgcccattcttgcccgttcggtgtaaaagttgcgacagcagcggctggaattgttagtgggtaatttaagttgtatgccgagactgcagtgtggagcacgcaaatgtcggtgcaaacgccagtcagtgttaacgcgtcaatctcgcgctcgcgtaagaaattatccagattagtgttagcaaatgctgaatagcgattctttgcaaatgcatagacgtgaggatcggtttggtgcttggtgtaccagctagctagtggtccgtaaaactcatggccccaagtattggctagattatgtggtgggaatagggcgctctctggatgaaatggatcatccttgacgtgtaaatcagtcggtaagatgacgtaatcaccggctgctaggaactggttagctaattcgataattacaggaacgattttctgagcgggtttgccggctgtcagagcaccgtttgggtcaacgaagtcatttgtatagtcgataatcaaaagtgcgttatgggacatgataaggacctcctggaggggatttaagttgctttcagtgtatcaaaacatggctagaaatccacgaatgacgcttgctacaagatttatgaaaatgttatgaaaaactttgataaatcagcaaaaaagggttgcgttatcgggttgtatcttgtaagatagataaagtgctatttccatagcaggagtgcgcaccatggtagtcaaaaagattaccgagtagctaagatgtgagaggttgcgacacacccggccgctttgccatgggcgggcgtgccggaaaaattttcacggagctagtctacttttaaaatagacgaaggagggaaaaacatggcaaaacaaaagattcgtattcgtttgaaagcattcgaacaccgtattttggatcaatcagctgacaagattgtggaaacagcaaagagaacaggtgctactatctctggcccaatcccattaccaactgaaagaacactttatacagtgcttcgttcaccacataagcataaagattcacgtgaacaattcgaaatgcgtacacacaaacgtttaatcgatattgttaaccctacacctaagacagttgattcattgatgaaacttgacttaccaagtggtgtagatatcgaaatcaagctttaattcgtaccaaccaattaaaaatactagaaaagaggtgttaccatgaccacaaaaggaatcttaggtagaaaagtaggtatgacacaagtctttactgaaaacggcgaattaattcccgtaacagttatcaaagcaactccaaacgttgttttacaagttaaaacaaacgaaacagacggctatgaagccatccaagttggttttgaagataaacgtgaagtcttgtcaaacaaacctgctaaaggtcatgtagcaaaagcaaatactactcctaagcgcttcattagagaattcagagatgtcgcattaggagattacgaagtaggaacagaaatcaaagttgatactttcgcagccggcgacgtcgttgacgttactggtgtaacgaaaggtcatggtttccaaggtaacattaaaaaagacggacaatcacgtgggcctatgggtcacggttctcgttaccaccgtcgtcctggttcaatgggtgctgttatcaaccgtgtcttcaagggtaaattattacctggacgcatgggtaacaaccaacgtactgttcaaaaccttgtggttgtaagtacagatgttgaaaagaacgttatccttgttaaaggtaacgtgccaggtgctaaaaactcaatgattacaatcaaaacagctgttaaagctcgtaacaaataatctgagaagggaggattttaccaatggcaaacgtaacattatttaaacaagatggtagccaaaatgggaacgttgaattaaacgactcaatctgggctatcgaacctaacgaaaacgttgtgtttgatgcaatcatcatgcaacgtgcttcattaagacaaggaacacacgctgttaagaacagatcagctgttcgtggtggtggtcgtaaaccttggcgtcaaaaaggtacaggtcgtgctcgtcaaggctcaatccgttcacctcaatggcgtggtggtggtaccgtatttggtcctacacctcgttcatacagctacaaattacctcgtaaagtacgtcgtcttgcaatcaagtcagtactttcacaaaaggttatcgacaatgatttagttgttgtagatgcattcaactttgacgcacctaagactaaagaattcgctgaagtacttaacaagttagacgttaatactaaagcattggtagtacttgaagacggaaatgattttgctgcattatcagctcgcaacttacctaatgtaactgttgtagctgctgatggtatcaacgtattagacgttgttggcaaccaaaaattaatccttactcaagctgctctttctaaaattgaggaggtgcttgcataatggaagcacgcgatgttattttacgcccagtagttactgaaaattcaatggctgcaatggacgacaagaaatacacatttgatgttgatgttcgtgccaacaaaacacaagtgcgttacgcaatcgaagaaatctttggtgtaaacgttaaaaacgtaaacatcatgaacgttcgtggcaagttaaaacgtcaaggtcgctatgctggctatactaaaaaacgccgtaaagcaatcgttactttaactgctgattcaaaagaaatcaagattttcgaagattaagcaacacttaaatagaataattataggagggtatacacgtgggaattattaagtacaaaccaaccacaaatggtcgtcgtaatatgaccagctcagattttgctgagatcacaaagacaacccctgaaaagacgttgttggaatcccaaagccatactgctggtcgtaatgcacatggtcatatcactgttcgtcatcgtggcggcggtcataagcaaaaataccgtgtcatcgacttcaaacgtatcaaagatggtatcaaagcgactgttaagtcaattgaatacgatccaaacagaacttcaaatattgcattaatccaatatccagatggtatcaaagcatacatcatcgcccctaaaggtcttgaagtaggcatggttgttgaatctggtgtggatgccgatattaaagtaggtaacgcattaccattagctaatattcctgatggtacacttatccacaatatcgaattaaaacctggtaaaggcggccaattggttcgttcagctggtacatcagctcaattattaggtaaagaaggcaaatacgctatcgttcgtttaacttctggcgaaacacgtatgatcctacttacatgtcgtgcaacgatcggtactgttggtaacggtcaacacgaattaatcaagattggtaaagctggccgtaaacgttggatgggtatccgtcctacagttcgtgggtcagtaatgaaccctaacgatcatcctcatggtggtggtgaaggtaaagctccaatcggtcgtccttctcctatgtctccatggggtaagaagacgcttggtaagaagactcgtagtagtaaggctcgttcagagaaacttattattcgtcatcgtaaatcaagataatcaattccaattgaacatgtctaaagccaatgcggcttaaacataagtcacattgaactttttattcgaaggaggtttcataatgagtcgtagtttgaaaaaaggaccattcgcagacgcacacttgctcaacaagattgaagcacaagccgatagcgaaaagaaacaagtcatcaagacttggtcccgtcgctcgacaattttccctagctttattggctacacaatcgctgtttatgacggacggaaacacgttcccgttttcatctcagacgatatggtaggccataaattaggtgaattcgtaccaacaagaactttccatggtcatggaaatgacgataagaaaacaaaagcacgctagaaaggaggatgaactcaatggcagatcaaattactagtgcaacagctagcgcaaaatcagttcggatggcagcccgtaaagtacggatggtagtcgacttgattagaggcaagagcgttgcagaagcaattgcaatcttagaatttacaccaagagctgcttcaccagtcgtaatcaaagttttgaaatcagctatcgctaatgcagaacataattacgacttagatgcagaaaacttggtcgttacagaagcttatgctaacgaaggaccaacattgaaacgttttcgtcctcgcgctaaaggctcagcatcaccaatcaacaaacgtacaagtcacatcactgtagttgtatcagaaaaagaagcataaggagggatatcgcgtgggtcaaaagattaatccaaccggttttcgtgttggcgtcatccgtgattgggacgctaaatggtatgcagaaaaagatttcgcaacattcttacacgaagatcttaagattcgtaaatatatcaacacaaaattagctgacgcatctgtctctactattgaaatcgaacgcgctgcaaatcgcgtgaacgtttcaatccatactgctaaacctggtatggtcatcggtaaaggcggttctgaagtagaaaatctacgtaaagaattaaacaacttaacaggtaagaaagtacacatcaacattgtggaaatcaagaaacctgatttagacgctcacttagtaggtgaaggcattgctcgtcaattggaagcacgtgttgctttccgtcgcgctcaacgccaagctatgcaacgtacaatgcgcgctggtgctaagggtattaaaactcaagttgccggccgtttgaacggtgctgacatgtctcgtgtcgaaacacatgctcaaggaactgttcctttgcatacgctacgtgcagacatcgattattcatgggacgaagccatgactacttacggtaaattaggagttaagacttggatttatcggggcgaagtattacccgctaaagccaacaacaatacgaaaggagggaaataaacatgttagtacctaaacgtgtaaaacatcgtcgtgaattccgtgggaagatgcgcggtgctgcaaaaggtggcaaagaagtcacttttggtgaattcgggctacaagctttagaatcaagttggattaccaaccgtcaaatcgaagctgctcgtgttgccatgactcgttacatgaaacgtggtgggaaagtgtggattaaaattttccctcacaaatcatacactgcaaaaggtgtcggcgttcgaatgggttcaggtaagggtgctcctgctggatgggttgctgtagtaaaacgtgaaaaagtcatgtttgaaatcggcggcgtttctgaagaagttgctcgtgaagcattacgcttggcatcacataaattgccagttaaaactaagatcgtaaaacgcgaggaagtaggtggcgagtcaaatgaaggctaaagatattattgaattaaccactgctgaaatgcttgaaaaagaacaccaatacaaagaagaattattcaatcttcgtttccaacaagctaccggtcaattagaaaataccgcccgcttaaagcaagttcgtcagaacattgcacggattaaaactgtattacgtcaacaagaacttaacaaataataaatggaaaggagctatttactttgagcgaagaaagtcgtaaccatcgtaaagtgtaccaaggccgtgttgtttcagacaaaatggataaaacaattactgtcgtggttgaaacttataaaacacatcctgaatatggtaaacgtgttagatattcaaagaaatattatgcacaagatgacaacaacgaagcaaaagttggcgacgttgtgcgtgttatggaaactcgtcctttgtcacgtacaaaacggttccgtttattagatgtcgttgaaaaagcagttattatctaaatcgttactcaatatatataagtgacggaaggaggacctataagtgattcaatcagaaagtcgtcttaaggttgctgataactccggtgcccgcgaaattttaactattaaagttttgggtggttcaggtcgcaagactgctaacatcggtgatgttatcgttgcaacaattaaacaggcaacaccaggtggcgttgtcaaaaaaggtgaagttgtcaaagctgttatcgttcgtactaagtcaggtgctcgtcgtgcagacggttcttacatcaagttcgacgaaaacgctgctgttatcatcaatgatgacaagactccaaaaggaacacgtatcttcgggccagttgcacgtgaattgcgtgacagtgatttcatgaagatcgtttccttagcgcctgaagttctataattacagacaaccaaggaggtgcgtatatcaatgttcgttaaaactggtgataaagttaaagtaatcagtggtaaagataaaggtaaagaaggtacaatcatcaaagctatgcctaaagaaggccgtgttgttgttgaaggtatcaataccattaaaaagcatgttaagccaaatgctcaaaaccctaatggtgggattgttgacacagaggcaagtatcgatgcttcaaacgttatgctaattgatccatcaaccaacgaagctactcgtgtaggtttcaaagtgattgatggtaagaaagtacgcgtttcaaagaaaactggagaatcaatcgataaataatcttttggggaaaggaggcactttttacatgactaaccgtttaaaagaaaaatatgttaaagaaatgacaccagcgttgatcgaaaagttcaactacacatcaagcatgcaagtacctaagatcgaaaagatcgtacttaacatgggtgttggtgatgctgtttcaaacgctaagaatttggataaagctgttgaagaattaggtttgattgctggtcaaaaaccattaatcacaaaagctaagaaatcaatcgctggtttccgtttacgtgaaggtatgccaatcggcgctaaagtaactttacgtggcgaaagaatgtacgatttcttagataaattagttaacgtatctttacctcgtgttcgtgattttcacggtgttagtgcaaaatcattcgatggtcgcggtaattatacattaggtgtacgcgaacaattgatcttccctgaaatcgattatgataaggtagatcgcgttcgtggtttggatgttgttattgtaacaacttcaaatactgacgaagaagcacgcgaattgttaacacaatttggcatgccatttgctaaataaaaagggaggtcaatttcttggctaaaaaatctttagttgtaaagaatcatcgtccagcaaaattttcaacacaagaatattcacgttgcgaacgttgtggacgtccacattctgtatatcgtaagtttaagctttgccgggtttgcctccgtgaattagctcataagggccaaattccaggcatgaaaaaagcaagctggtaattataaagagtcaataaggaggttaattccacatggtcatgacagatccaatcgcagactatctaacacgtattcgtaatgccaacatggtacatcacgaatcattagaagtccctgcttcacgtatgaaaaaagaaatttctgaaattttgaaacgcgaaggctttatccgcgattacgaagtgattgaagacgacaaacaaggtatcatccgtgtattcttgaaatatggtaagaataacgaacgtgttatctctggtttgaaacggatttcaaaacctggtttacgtaattacgttaaagctaatgatgttcctaaggtattaaacggcttaggcatcgcaattatctcaacaagcaacggtgtcgtaactgacaaagaagctcgtgaaaaggctgccggcggcgaagttctcgcatacgtttggtaatctaaacttaaaataaggaggtgtcataacgtgagtcgtatcggattaaaagtaatcgaagttcctgcaggtgttaccgttactaaagacggtgaaaacatcacagttaagggacctaaaggtgaactaacacgtcatttcagtccagtgattgaaatgcacgaagaaggtaaccttatcaactttacacgtaatagtgaaagtgatcgtgcaatgcacggtactatgcgtgctaacttaaacaacatgatcttgggcgtaacggaaggtttcaagaagacattggatcttatcggtgttggttaccgtgctcaattgaaaggcaagactttagtattgaacgttgggtattcacatccagttgaaatggaagccccagaaggtgttacagtcgaagtcccatcaaacacaaacatcatcatcagcggtattagcaaacaacaagttggccaattcgcagctgaaatccgtgatgttcgtcctccagaaccttacaaaggtaaaggtattcgttatactgatgaatatgttcgccgtaaagaaggtaaaactggtaaataaagcagcctgagctgttaaacgatattaagaggtgaaaattgtgattacaaaaccagacaagaataagacacgtcaaaaacgccatacacgcgttcgtggcaagatctctggtactgctgactgcccacgcttgaacgttttccgttctaacaaaaacatctacgctcaacttattgatgacgtagcgggtgtgacgctagcaagtgcctcaacattagataaagaagtaaaagcagaaggtactaaagtagaacaagcacaacaagttggcgcattagttgcacaacgcgctgttaaagccggccataaagttgttgtttttgatcgtggcggttacttataccacggtcgtatcgaagctttagctacagctgctcgtgaaaacggactagaattctaataaggaggaaaaccatttatgacttacattgatccaactcatttagatttagaagatcgcgttgtttcaatcaaccgtgttacaaaagttgttaaaggtggacgtcgtctacgtttcgcagcaatcgtaatcgttggtgataaagacggtcacgtaggtttcgggacaggtaaagcacaagaagttcctgaagctatccgtaaagccgttgaagacgctaaaaagaatcttatcaatgttcctaaggtcggaacaacattacctcatgaaattattggtcgcttcggcgctggtcgtgttctattaaaaccagctgttgaaggttctggtattgctgccggtggtgctgttcgtgccgtcatggaattagcaggaatcgatgatgtgacaagtaaaacattaggtagcaaaactgctatcaatgttatccgtgccacaattgacggtttaactcgtatgaagactgctgaagaaattgcagaattacgtaatgtatctgtagaaagcttacaaaactaggaggataactgaacatggctaaattaaagattactttaagaaaaagtgctgctcatcgtcttccagaacaacgtaaaatggtcaaagaatttggcttgaaccgagtaaatagttctgtaatcaaaccagatgatgctgcaactcgcggtgtgattttcaaactcgcacatttagtaacagtcgaagaaattaaagactaatttcaacatatattgcaaggaggtgcgcacaataatgaaattacatgaaatgaaacctaacgaaggtgctcgtgacgttcgtaaacgtgtcggccgtggtacttcttcaggtactggtaaaactgctggtcgtggtcaaaaaggccaaaaagctcgtagtaaagtacgtttaggatttgaaggtggacaaatgcctttattccgtcgtatgccaaaacgtggattcaagaatatcaaccgtaaggaatatgctgttgtcaacttaaacgatttaaatcgttttgaagacggtgcagaaattacttcaactgttttaatcgaagcaggcgttgttaagaatgaattatcaggtgttaaattattagcgaatggtgaattaaacaaaaaattgaacattaaggtaagcaagtattctgaagctgcaaaagctgctgtagaagctgctggcggttcaattgaggtgatttaattgctaaagacactcaaaaacgcatttaaagtaaaggaaatccgtagtaagattttgtttactttaggcgttttgatcgtttatcgtttaggtgcacaaattacggtaccaggtgtgaatgctggtgcattgactaagttgggttcaactggtttgatcccattgcttgataccgtaagtggtggtggcttggcgaactattccatcttctcgatgggggtttcaccattcatcactgcccaaattgtggttcaattactacaaatggatattgtgcctaagtttgttgaatggagcaagcaaggtgaagttgggcgacgtaagcttaaccaagtaacgcgttacttaaccatcatcttagcgtttatccaatcgatagggattaccgctggctttaactcactcagtcaaatgggcttggttaaagatccggggattaagaccttcgttagcatcgggatcattttaacgggtggtacgatgttaattacatggttgggtgaacagataacggataaaggcttagggaatggtgtgtcaatgatcatctttgcagggatcattgcacgccttccaagcggtctttaccaaatcttccgcgaacaagtcttgaacgcttcaaaaggcgatatgtggaaaggtgtcttattcatcatcggtttgattattgcagtactcgtgattgtcacatttgtgacatgggtccaacaagcaaatcgaaagattccgattcaatatacgcgtcgtgaagctggtgcaggtgaaaatagttacctaccccttaaagttaacgtcgctggtgtgattccggttatcttcgccagttcatttattatgacacctcaaacaatcttactggccttccaatcaggtcatggtgcagatacttggtttaaagtattatcagatatcttcagcatgcagactgtgacaggttcgattgtttatacggtgctcattgttctctttaccttcttctatgcttttgttcaggttaaccctgaaaaagttgcggagaacttgactaagcaagggagttatatcccaggtgtttggccaggtaaaggtaccgagaagtatctttctagcgtattaatgcgtctttcaactgtcggtgcgttgttccttggggtaattgcattattaccacaattagcagcaaacctcggtggcttaccccaatcaattggtttgggtgggacgagtttactaatcgttgttggtgttgcgcttgaaagcacacgtcaactcgaagggttacttatgaaacgcaagtatgttggattcattcgataagcaattatcgtttaaaaagtattgaatcctggttttaaataggaggcaaaggcatgaatctcatgttaatgggacttcccggcgctggtaagggaacgcaagctgaaaagattgttgacgcttatcatattccacacatttcaactggtgacatgttcagagctgctatggcagatcaaacagaacttggggttaaagctaagtcattcatcgataaaggtgaattggtaccagatgatgtgaccaacggaattgttgaggaacgtcttgcacaagcagatactaatgtaggttatctccttgatggttttcctcggactcttgatcaggcggatgctttagctgccattactgataaattgaacaaacctttagatggtgtgattaacattgatgttgatcctgaaatcttggctgatcgtttatctggccgctttatttgtaaaaattgtggtgcaacgtaccacaaactttaccatccaactaaagtggaaggtacatgtgatcgttgcggcgaacatgttttcttccaacgagaagacgacaaacctgaaacggttaagaatcgcttaaaggtcaatatcgaaatgaatacacctttacttgattattatgaaaaacgtaacctactttacacggtagatgggaatcaagaaattgatgatgtgttctctgccgttcaaaaagtacttgataccattaaagactagtcatcaactcaagtgatctcacggtcattgttcacgtaaaagcctgactagttgtttaatgacagaattctcagtgcttttaaaaatttaatacttgtgatataatatctcggtatgaccactagcggtgagtgcggagagctctcaccatttttctgtatgaattttcacaaccacaagggggtacttttgcgtggcaaaagatgacgtcattgaaattgaaggtaaagtaactgatactttaccaaatgcaatgtttaaagtagaacttgaaaatggtgcagttattctggcacacgtttctggtaaaatccgtaagaactacatcaagattttacctggagaccgtgtgacagttgaattgtcaccctatgatttgactaagggacgaattacgtatcgctttaaataggcgtaaggatcatatcaaggaggtcagtcgatatgaaagtaagaccatcagtaaaaccaatgtgcgaacattgtaaagttatcaaacgaaaaggccgcgttatgattatctgcgcagctaacccaaaacataaacaacgtcaaggttaatattaattaagcaggaggtgcaagaatggcacgtatcgcaggtgtggatttaccacgtgataaacaaattgtgattgctttaacttatattttcggtatcggaaatacaactgccgttaaagtcttggctgatgctggcgtcgcagaagacgtccgtactcgtgatttaacgccggatcaagaagacaagatccgtgcagcaatcgacaaagttaaagttgaaggcgatcttcgtcgggaagttagcttaaacatcaaacgtctacaagaaatcggttcttatcgtggcatgcgtcatcgtcgtggattaccagttcgtggtcaaaacacgaagaacaacgcacgtactcgtaaaggtaagaaagttacgattgcaggcaagaagaaataatcagtaaaaggaggttataatttatggcaaacaagaaaaatgctccacgtaagcgtcgtgtgaagaaaaatatcgaagccggcgttgcacatattcactcaacatttaacaatactcttgtgatgatcactgatcctcatgggaatgctgttgcatggtcatctgctggttcattaggtttcaaaggtagtcgtaagtcaacaccttttgctgctcaaatggctgcagaagctgctggtaaagaagccatggaacatggtatgaaatctgttgaagttgctgttaaaggaccaggttctggccgtgaagctgcaattcgctcattacaagcaactggtttagaagttactgctattcgtgacgttacaccagttcctcataatggatctcgtcctccaaaacgccgtcgtgtttagtctgggctacgcttcattttgagacaaactgaaacgtgttcacgtataaacacttctcgttttgaaaggggtaaaagataagaatgatcgaatttgaaaaaccaaacattacaaaggttgatgaaagtactaactacggtaagttcgttgtagaaccacttgaacgtggctatggtacgactttaggtaactctttacgtcgtattttactcgcttctttaccaggtactgctgtcacagatattcaaattgatggtgttttacatgaattttcaacaattgatggcgtcctagaagacgtaacacaaatcatcttgaatattaaaaaattagcacttaaattgcatgttgaagaagacaagacaattgaaatcgatgttaagggtccggcaacagttactgctgctgatatcatttctgatgatgacgttgaagtcttaaatactgatcaatatatttgtacagtagctgaaggcggcaatttccacgtgcgaatgacagttaaaaaaggccgtggttatgttgctgctgatcaaaacaagtcagacgatatgccaattggtgttttgccaatcgactcaatttataccccaatcagtcgtgtcaactatcaagtagaaagtacacgtgttggtcgtcgtaacgatttcgacaagttaacacttgatgtttggacaaacggttccatcagtcctagagaagctattagcttagctgcgaagattatgacagagcatttggcaatctttgtagatcttactgatgaagcgaaaaatgctgaaatcatggtcgaaaaagaagagacacataaagagaaaatgcttgaaatgacaattgaagagttagatttatcagttcgttcatacaactgtttgaaacgcgctggaatcaacactgttcaagagttaactgacaaatcagaagcagatatgatgaaagttagaaatcttggtcgcaagtcgttagaagaagttaagaacaagttatttgatcttggcttaggcttacgcacagaagaataaactgataagaaggagggactccattcatgagttatcgtaaattaggtcgcacaagctcacaacgtaaggcaatgttacgtgatttgacaactgatttaatcatcaatgaacgtatcattactacagaagctcgtgccaaagaaattcgtaaaacaactgaaaaaatgatcactttaggtaaacgcggtgatttacacgctcgtcgtcaagctgcagcattcgttcgtaacgaagtagctgatattcgcgaagaagacgatgctgtaatcgttcaatctgctttacaaaaattatttagtgacattgctccacgttatgctgaaagaaatggtggttacacacgtattcttaaaacagcccctcgtcgtggtgacggtgcattaatggtgattattgaacttgtttaatcacaaaatgatttaggtcatttgatcgatgagacagggcgttatgatgatggaagtactccgagtctagtcctaaggtcatactagcaacacagtatggctttcatcgattgatgatttacataaaataacgtctaattccgagttaaatcggagttagacgttttttgtgttggatatcctttgaataaagggtgactaacgaaagcgctatggccttttatatgataaaatagggacaggtttttgatttgaaacgtgcatggataacataaccaatgcactttaattccaaggaaaatacgggttattaatcatgaatgagcaaaaaataattcaagttgaacatttaaaatatgaatacccacaatctgaaggacatttagcactgaatgatctttctgtcagtatcaatgccggcgaatgggtcgccattatcggtcataacggtagtggtaagagtaccttcgcgaaatcattgaacggtttgttagatttacaatcgggatcagtgacgattgatgggttaccattgtcgttggataacgtgtggactattcgccagaaaattggcatggtttttcagaatccggataatcaatttgtcggtgcaacggttgaagacgatgttgcttttggtctcgaaaatcaggggattccgcgagctgaaatgattgaacgggttaaagacgcggttgaacgtgttggtatgagtgaatacttgaaacgtgaaccaagccgtttgtcgggtggccaaaaacaacgagtggccttagcagggatcatcgcacaacaacctgagattctgattctcgatgaggccaccagtatgctagatccaaaagggcgcgaagaagttctcgcaaccatttataagttaaaacaagaaacaaacatgaccgtgctatcaattacccacgatattgacgaagccgcaagtgcggaccggatcattatcttagataaggggcaagtgcatgatcagggcacaccggccgatatttttgcatatgggcaacgtttgcttgatttagggctagatgttccatatccagaaaaacttaaagcagcgctaaatgaacgcgctatcgagatgcccacagattatctcacaacggaaaggatggttgagtacttatggacattacattcaaaaatgtaagctacacttatcagccaggcacgccttttcaagggattgggctagaaaatatcaatgtgaccattccaagtggctcctatacggctttgattggtcatacaggtagtggcaagtcgacattgctccaacacctcaatgcactcttaaaaccaacgagcggcgttgttcagattggtgagcgcgaaatcacgcctgagaccaacaacaaaaacttaaaggctgttcgtcaaaaagttgggatggtttttcaatttcctgaaagccaattatttgagtcgacggtgcaaaaagatattgcttttggtccgcagaacttcggtgtccctgaagctgaagcacttgaacgcgctaaagagatgattgaactcgtcggtttacccgctaacgtgattgacaagtcaccttttgatttatctggtgggcaaatgcgccgcgttgccattgctggtgtgttggcaatgaaaccggaagtattggtcttagatgaaccaaccgcggggctcgatccagttggccggcgtgagatgatgacgctttttgaaaagttacacagtgagcaggggatgacgattgtgatggtcacccatcagatggatgatgtggcgaactacgccgacaacgttatcgttttggaacatggcaagctagctaagaccggagcaccacgcgaaatttttgcggatccggattggttaacggaaaaacaacttggcttaccaacaacgactcagttcgcgcaagctttaatgcgacaaggctttgtctttgatcaagtaccactaaccgaacatgaattggccgccttattagcggaacaactaccgaagaaggcggggattggacatgaataaattaattctgggccgatatatccccggtgattcagtgttacaccggatggatccacgggcgaagttattagccagtttttattatattgggatcatctttttagcgcgtacatggcaagcctatgctttattactggtctttacgttagcgctaatcgggatttcaaaaattaaactcgacttctttattaaaggagttaagccgctgttatggctaattctatttacagtgctcttacagattttcttcacccgtggtggtcatgtctattggcagtggggatttctgacgcttacccagtacgggctgattaatggcgtctacatcttcatgcgctttgtattgattattttcatgtcgactctcctgacattgacgacgccgccattgtcgttagcggatgcgattgaatcaattctcaagccgcttaaagtagtccattttccagtgtatgaagttgcattgatgctatcaattgcattgcgctttgtaccaacattgatggatgaaaccactaagattatggatgcgcaacgtgcgcgtggggttgattttggtgaagggaatttattccaacaaatgaaagcaatcgtgccgattttaattccgttatttgtcagcagttttaaccgcgcggatgatttagcaacggcaatggaagcacgggggtaccaaggtggcgaaggccgcagtaagtaccgaattttgaaatggcggacaagagacaccgtggcatttatcacgatgggccttttaaccgtcgcacttttattcttaagataacgcaaaaaggactcagttaaaccaacggaggttgatttagctgagtccttttttttttgcacttttttgattagcttgtttttttgaaccgacgtttcaacgttgaagcactaatgccagtttggtaactaatttgagcgtacgtaaagccctcttcacgcatgtctagggctgcttgtatgttcatcatcagtataggtcgttttacgaccttcagtgtaactagggttggtgacacgagcattatggttcccttcctgggtacgagtgagaatcatatcgcgctcaaattgcgcaaaagcactaaataaggtaaaaatgagtcgtccggaaggggtgtcttcaatgatgcccatgttcaaaatatgaattttaatgcgggctttaaaaagttcttggatgatttcaagtgcttctttggtatttcttgcgaagcgatcaagttttgtaacaacgatggtatcaccacttgaaacccgatctaatagttcattaaatttagggcgatcaacggtagttccggtaaacttttcgctgtagataatgtcacagctttcttcctttaattgactaatctgggttgctagactttgtccggcagatgaaacgcgtgcgtatccgaacttcattgcacaattctccttatttctacttataataataattatacagcatttgaacttgttttatattaaaaatgcatttttaaatcaaattttttacgaacattcataaaaagattgctacttttcagaaaattatttagaatagaactactaactttttaacacaagagggataaaatgacacaacggtatcgcgtaacaattgcctatgatggaacggattttgcgggtttccaagtgcaaccgaaccaacgaacagtacagggcacattagaaaaagcactgacaaagatgagtaagggtgcttatattcaagtgtatggttcagggcggacggacgcaggtgtccatgcaacggggcaggtggtccatttcgactatccaggtcaattacccgctattagtatgttacgggccttaaatagcctcttaccgcttgatatggaggttgtggatagtcagttagcgggcgatgactttcatgcacgattttcaacggtcggtaaacggtatatgtatcgggtcgatcttgggcattatacgaatccattcaagcgacgttataccggtcattatccgtatccaatcgatgtggaacggattcaagcggcgctgccagatgtgatgggcacgcatgattatacgagttttgcggcttcaggtggggtcattaaggataaggtgcggacgatttatgatgcgaccgttgttttcaatgaacccgaaaatgaactcgtttttgagttttatgggaacggctttttgtataacatggtgcggatcttggtcggaactttattagaaattggtaacggtcggcgggatgtccacgattttttacggctgtatgaagttaaggaccgtcaacaagctcgctcaaccgcgccagcaagcggtttgtaccttaaaaaagtttattacgaaactgatgaaaataattgagattcaattgacttaatcgtgaaattacgatactatagtatctggtattgtttgccccacgataggccccggaaacttattgagtgtcaaacaaacacagaatattggaggaataaatcgtgcgtacaacttacatggctaaaccaggcgaagtagaacgtaaatggtatgtgatcgatgcaactgatattgcattaggtcgtctatcaactgtagtcgcttctatcttacgcggtaaaaataaaccaacatttacacctaacgttgatacaggtgataacatcatcgtcatcaacgctgaaaaaattaaattaacaggtcgcaaagcaaccgacaagttatatcatcaccatagtaaccatcctggtggtttgaaaactcggactgctggcgaaattcgtgaaaacaacccagaacgtttaattgaaatgtcagttaaagggatgttacctaagaactcattgggtcacaaccaattcttgaagttacacgtatacgctggtggcgaacacaaacatcaagcacaaaatccagaagtcttagacattacggacattatttaaggaggaaactatagtggctcaagtaacttataacggtacaggccgtcgtaaaaactcagtagctcgtgtacgtttagtaccaggtactggtaaaatcactatcaacaacaaagacgttgttgattacattccatttgctaacttgattttagatatgaaacaacctttaacaattactgaaacaacagatagctatgatatcttggtaaacgttaatggtggtggattctcaggccaagctggtgcaatccgtcacggtatttcacgtgccctattgacagttgaccctgacttccgtccagctcttaagagcgctggcatgttaacacgtgaccctcgtatgaaggaacgtaagaaaccaggtctgaagaaggcgcgtaaggcatctcaatttagcaaacgttaatatcgttatgctaccgagatggaaacgttggtacgacaacgtttcaaacgtatctcgtttaggaaagtggttctcccaattagggcgagccactttttttgtccctcgtttttgtgcgcgttttgtgcgcgtgtctctgtcgagggtcatttgcatcgcgaccttttagggcgtcagctcaagccttacgttgctttgtgcgtcaattttaacgagtttcgttgagtttcatttcctgcgcgagtgaattcttgcgcgcctctgcgatccgttcagcgaacttattatgcacatccagaccgaccacatcaggggtgtttacgtaaatccgcgtggtcttaatatcggagtgcgtcagcgcttcggagatcagttcgaggctggcaccaccttggcgagctagagtggagaacgtgtgccgcagcttgtgtggcgtcacgcgcaccagctcctctgcatggcgcttgtagattgaattcagtcgatagttcaagtagtccgcatggagcggttgattgatacctcctctaaagttggtgtaggtgaataggaactgatctgggccagcttggatattcacgtcagcaagctccttggcttgttgttccttccactctttcaaaagtggaatcagaaacgccgggatctggtgtgaagtttccttgttggctttggttggcccgattttgccgctctttttgagggcttgaataatcaggacgtaaccggtgttgaagtcaatgtgtttccattgcaacccgtatgattcgcctttgcgatcaccaaggttcaacgtcatcagcaacagcaagtagtcttggaaggacagcttccggttctcgaagtcttctttggcagcatcgagccaagcaatcatttcatcagcagatagagacgagccggtcattttacgccgagtggcgagccgctccttcttcgggctgccgaccaatcgtagggctttttcgatacggttggcgtcgatgtagtccatgatctcggcgacctcgaagacttggcgaacgtaagccttgaccgtgcgaatgttcgcgtacttctcagccaagattgaaagttcttgaaccacgaactgcttgttcaggttcaagtagttcagtgaataatcaccgaacagcggtagcaagtgcaaccggaaaatgttttgggtgttgacctgggtttcctcggaaggaacgacccggatgcgcccactaccaccggcagtgtacagtggccaccaaacttcccggtagaaatccttgaacaggatctcgccgttagtttgaatggaacccgccgacgccttgcgctgtgcttctttgatcttgtcttcgactttcttctgcaatgccttcgcttccagcttggttgcgacggttttgcggtaacgcagcgtctttacgccgatgatgtcgcgaatgtctttggggtagaacacctccacaaaataagtgcctgcatcagttttagtaattgccatgatatttacctcctgttggttgtcaacgagcttgaacaggacgtaaagctacatcgacatattaccatccttcaacacgtttgcgaagccatgcatcgacggcatcgcgatcataacgaaccacaccgcagacgttgattcgtggtaggccaaggccaatccacttatctaaggtgttgttagaaatttttaagtagtcgcacagttccatcttcaacagataccgattgttggtggcgagttcgttacgcgctttgttgacctcatcgagaaacaaggtggctagcgcgttgcgaatcgcgatcacgttgcggtcatccattggaaaatcgagtgtggactgggatgctggtgcttcgataaaacatgcctcctttccggcagtcacgaacagactgatgcgaatacgacaggcggtcatcattcagcccggttccaaccggctattgagaacctcgctgtgagacgctctttctcccgtttcgtggcagtgacgtacaagtatccggcctactggggtaatcgctcgctcgtgtgaggttgtggcgttgtgaggcctgcgttgctaaatgatggtattcagttgtcaaaggacatcggcggtaatcaaaaacccgcttcgttatatacagacaacgaaagcgggtcgaaatgaaagggattggtgaaaattgtttatgtttttttctgaccgggattttgtgagggtagcgcaaggtgctgctcaacgttgaagcacttcgcaatgtagatcagtttgatttgaagctcttgtcttaaatctggatcgacgtgccgttgcccgtacttggcctcgtagtcaatatcacggccaaataattcaagcatgagggaaacagcgtcgtcgttgtcctcctgaaccgccaaaataaccggtactaggttatcgatctctgaataatgcattgaatactcctccgcatccattacatgtttgtgtatgctgcccgaattcgattcaaagcccgttgccggcgataattcaccccctggccagttttgccggaacggctaccgatttccacgtcgttcagctcgtcataatagtattgatacaacaccatcttatcaggtagagaaagggaagcaaccgccgtggcaagacgctcgttttcgatgaagtcctccaagtgttcgatttcctcatcggtcagtttgagttcgtcaagatggtgtggatcttcaatttcttcgatgagccattcttcgagtggtgtctctttgattcggcgaagattgactttgtggcgattgattcgttcgttcttgagcgcttgctgcacatagcggataaacatccgcgacacttcttgttcactactcatttgaatggcctcctaaaatcaactaatgtggttacatatagacagacaactttcggcacatgaaatgaaaggggattcaggaatttgttaaataatttcacttgtacttagtggctgttgaactaggccgccatatcttcgacccttgtagtaaatttatagcgaatttgataggcctcaccctcgaatttagccaaaattaaaattggtatagcaaatacccttaacagggtcagcacattgctcaagacgatggccgcgtcaatcttgacggccagtgattcagctgtccgagtgttcaccaagtcaagccccagcgtgcccttcataaaagcaaaccggcgttcaatggtacctcttcgattctcggcatcagtatcctcacgccgtttcgctgcatcaacgtgttttggatgccggccaagcttcggaccgcagattcggatacccaaatccttacacagctttaggttctcccgattacggtacagcgtatcggccagtacttcatccggataatgtccatgaaggtcgtaatagtggtctaaagtttccgcgaagtcttggccctcagagaatgcggtgaaatcaaaacgttcaatgtcgactacgccttcacttaacgaacagtcaatcttcgccccaaattcaactttagcattggccttaccacgttgaattgggcgaatgtacggctgttggagactaacaattcggtcttcaacgtggtgagtcttgtgggtatacatgtaccattgctggtcaaatagaattcgaatcacgcctaagcgaatcgcttgttcatctggtagagtcgcaccctgatcgatgaattcgttgatgtaccgcaaatcacggcgcacatattgaagttgggccttgacctgtttatgaaagccaccacgctgttgctttggatgtcgtgaaaatgaggtccaacaatgcttcgcctcgcgtttgtacatgcgtgggtttggcacaccaagttggtgtgccatatcgatcgccatcgcctcaagattcagccttgcttggttgaggaggacggtgtcttgaggatacttgattttgactggcactgcggttgcgtccgtgatgacggtgtccactttgaatgggaccaacgcttcgatcttggcgcgtactgtatcattcatgatattcgtaatcagctcggagatatcggcaattcgtttgcgaaagtgtgccaggctggaataattgaacggctcaaccgctttgtattcggacaacccgatgaaatattgaagtgcgggtgtatcacgaattgccgcaaccaccccacgatcagttaaacccatccgttgttggatcaggattgccccatagagtaaacgaaatggttttgccgcacgtcccgcatttttggtgaactccaattggtatgcctcatcgagagctttccagggcatgacctccgccaactggacccactcattgttagagctaagtggggtacttaaaccggcaccaaaggattcaaatgacaattgaagtgggctgtgacgatagaccatacgataacctccgagtaggttcccaaaaaatgcaaggaaaatgcaggaaaacagctaattccaatggatttattataccgcaataatgcatatattagcttaactgcctgaattatagaatttttaagcagccactatgtagtggacactgaatatttgtaagtgccttgttttaatgggaaccgttccgttactgtcgtataatgaatgcagaggaatttcctgtttttggcagtttcccttgcacttgtcatctcgtaacggaggatttatccatggtttatcggcatactgacgttcaactatctttcgaatcgtttgatcctggattattcacctcggtatttgggacatgaaatcgcatctggccggtctgaaagcaacgtttggagcgttgcgaatactgactgagcggagaagttggtgatcgatgcaccacgaacagaccgacccagttttcggctcgacgcacgacctattcagttattcagttcaggtcgccaactgatggacttcgtccatgagccgactaaaccagttcttgtaaacatttttaaatgttttttgaataaatattcaaactgatttaattatctgactcgttagcaacaatgttttatctcgctgacaacatagactactatatcagctctacagcctttcgtcaactattaatctcaactgttatttatgaactttcataatctaaacagtcgatagtatccgcaatttatgcaaataaatgaactattaaacaaacaactcgcgcaaacaacataatataccgaaagttgatgcttattcacccacaaaatacactaaaaaaactttttataatcccaatttttttcaataaaaaaagcccgcaagcaaatcgtctgcttgcgggctttagtttaatcttaatcgttattattgttgtctggacgcattgttgggaataataagacatcccgaattgatgcggcatctgtcagtaacatgactagtcgatcaatcccaattccaagtccgccagtcggtggcattccgtattccaatgcttcgatgtaatcttcatcgattccttcggcttcatcgttcccattttcacgttctttagcttgtgcttcaaaacgttcacgttgatcgatagggtcgtttaattcagtaaaggcatttgcatattcgttaccgtacataaataattcccaacggtctgtaaaacgatcatcttcagcattcttcttagccaatggtgagatttcaactggatgaccatagatgaaggttggttgtaccaatgtatcttccacgaattcttcaaagaacgcattaatgatgtgccccacttgccagtatgattcatacttcacgtggtgttgatcagctaattcacgcgctgcttcaaccgtcattggttgccagaaatcgacacccgtcttttccttaattgcatcgaccatgtgaacccgtccaaaatcaccatcaagatcaatcgcttgtccttgatatgaaatctgaccagttcctaaaaccttgtgcgctgcaaatcggatgatcccttctgtttcatccataacgtctttataatcaaagtatgcagcatatgtttctagcattgtaaattcaggattgtgtttcgtatcaatcccttcattccggaatacgcggccaatttcatagacacgttccatcccaccaacgattaatcgtttcaaatgaagttcaagcgcaatccgcaagtacaagttgatgtctagcgcattgtgatgggtaataaatggtcgtgctgatgcaccaccagcttgaccatgcaagacaggtgtttcaacttcagtaaagccattgttatctaaatattcacggacagcagaaataatcttgctgcgtttcgtgaaccgatccaagctctctggatttgcgattaaatctaagtaacgttgacgatagatttgttccacgttggttaaaccatggaacttatctggcaatggtcgtaatgcttttgataggaaagtcaggtgcgttgctttaacagttaactcacccatgtcagtcttcataatttgcccagtaatccctaaatgatcacctaagtcagcctttttgaaaattaaatagttttcttcgccaacttcatctttacgcacgtaaatttggattttacctgaacggtcacggatgtcagcaaagccaactttccctttcccccgtttagacatcatccgtcctgcaattgtgacttctagattcttagcatctaaatcgtctttttcaattgcttcgaattcactgtgtaattccgcagccatatgtgttctatcaaaacgactaccaaaaggatcaattccttcgtcttttaacaattgtaacttttcacgccggacctttagttggtcgttcatttctctttgattatctttttgtcccaactgacaattcctccatacattcaattatctactaatgttgattttaacacgaaaacaccaacataaggaacctaatttgccattctcgcttcggtttcttctacaaagcggtctaaaatatcgccaacggcttgttccgtttccacttcgttaaccgccgctttggtcttagccgcacgaggaatccctttcaagtaataggcagcttgttgtctgaattcacgacaagccacattttcacctttaagttcgactaaacggtgtaattgtaacttggccgttgcaattttttcccatggggttggttcagcaatcaattcacctgttcgtaagtaggtttccacttggcttaaaatccatggattaccgagcgcagcccggccaatcatgacagcatcagcacccacttcgtctagcatacgtttagcatcttgtggtgtccggacatcaccgttacccataaatggaatcgttaattcagatttaacctgttttaaaatgtcccagtctgcttgcccggtgtacatttgtttccgtgtccgaccgtgcattgcaagtgctgaagcaccagcacgttcggcagcaagtgcattttcaacagcgaaaatatgatcttcatcccagcctgtccgcatcttaaccgttactggcttcttcacggcatctgtcacgtatgagaccatttcataaactttgtttggatctaataaccaacgcgcgccagcatctgtcttaacaactttattcactggacaacccatattgatatcaataatatcagcttgtgtatgttgatccacaaatttagcggcttccactaaggtgtcttttgaaccaccaaaaatttggatgctaactggatgttcgttcggatcaacaaacatcatccccattgtcttttgattattgtgcataattccgcgatcactgatcatttcacagaccactaaacctgcgccaaattcctttgcagttacgcgaaatgctgcgtttgtaataccagccattggtgcgacgactacttgatttggaatcgtcacgtctcctatttgccatgtcataatgccaacccattcccttcgtgtcttccgacaatatccaaattatcatagcaaaaaaatagtattcaggcaaaaatttgcgactattctattgcgcggctaaaattgcctttagttctgcttctgtaaattgatattgcttgccacagaaacgacaaaccgcttcagcaccgtggtcttcatcgattaattgttgtaaatccgctggcgcaacagaactgagtgcctttgcaaaccgatcctttgaacaatcacattcgtatttaacaggtattttttctaacgtcttcattgggagttcgcccacaatttcagtgataatttcctctgggctcatcccttgttggagtaattcagacaccagcggcatttctttcagccgcgcttctaagatatcgattaaccggtcatccgcccctgggagaatttgaatcatgaagcccccagcgacaccaattgagttatcttcattaacgaagactgaaacgccaactgcagatggtgtttgttctgatttagcaaggtagtaagtaaagtcttcacctaattctcctgataccaatggtacttgaccggtaaacggttcttttaagccaagatctttcgtgacactcaacgtaccagttgtcccaacgccacctttaacgtcaattttatttttgtcgttcaatggtaggttaacgtgtggattcgtcacataccctttaactgtgccttgcgcattcccatcgacaacaatcttcccgactgggccgtcaccttcaactctgactgtcatcttcgtatcaccttttaagccagcggcactcaataaaagggtgccgacaatcgtccgcccaaacgctgctgatgaagttgaccatgtgtcatgtttttcttgcgcatccgttacaacatcagttgcgttcactgcataagcacgaagttggccatcttctgaaatttgtttaattaaataatctgtcatctaaataacctcttttatggattgatgcaaaaaggtcgaccactaatcgtgtcgacctttttggtgtaacaatttatgcttcatcgtctggatgttgattatcctcagctggtgtcgattgatcatcttcatcaggtgtgattgtcacatcctttttatcagtttctttttctgaatcttcttttgcggcttcttttgcttcaagcgccttcttagcttcttcaaaagtagctgctttttcgcttgggaattcttcagcgttcttttctggcatcttaccatcattgaacaagctcaagatttctttttcgtttaatgtttcgtacttcaagagcatttccgcaattaacttatgttgttcacggtgcgcttcaataatttcgtgtgcttgttgatgtgcttcgtcaataatccgacgaatttcactatcaattgcagccgcagttgtttcggagaaggctgggccttgaccgtaagctgccccaacgaatggttgaccttctttttcaagggccactgtcccgagcttatcagtcatcccatattgagtaaccatcccgcgggcaatatccgttgcttgttcgaaatcgttagaagcaccagttgattgagagttgaaaataatttcttcagctgtccgaccaccaagtaacccaacaatttgttctgttaattctttcttactcattaagaactgatcattcttcggtaacatgatggcatatccgccagcacggccacgagggacaattgttaccttccgaacaacacgagaatcactaagaactaaaccaatgatcgcatgaccagcttcgtggtaagccacggtttcacgttctttaggattaatcacgcgatcccgcttagcaggacccgcaatcacacgatcttcagcttcatcaacatcagaagcatcgatatcggtcttgctacgacgagcggctactagagcagcttcgttcaataagttttcaagatcagcaccaacgaaccctggggtttgttgcgcaatttctttcaaatcaacatcatcggctaaaggtttgttcttagcatggactttcaagatggcttcacggcccttaacatctggacgaccaactaggatcttccggtcaaaacgacctggacgtaaaagcgctggatctaagacatctgaacggttagtagcagcgatgacgatgacgccttcgttccccgtaaacccatccatttcaactaacatttggttcaatgtttgttcacgttcatcgtgcccaccgcccatgccggcaccacgttggcgaccaacagcatcaatttcatcaataaagataattgatggggctgcttttttggcttgttcgaataaatcacggacacggcttgcaccgacaccgacaaacatttcaacgaagtcagaaccagagattgagaagaatggcacacctgcttctccggcaacggctttagctaataaggttttaccagtacctggaggtccttctaaaagaacacccgctggaattctagcccctaatgcagcaaacttccgtggatcttttaagaattcaacaacttcgactaattcttgtttttcttcttccgcaccagcgacatcagagaaacgtactttattagctttcttgtcggctttttgagctttggacttaccaaagttcatcatccgaccgccttgaccgccaccttgacccgcttggcccatcatcatgtagaataaaccaaacatgatgatcaatggcaatacaagacttaaaatacttacccaccaaccagattgtggttcttgaagggtttcaaccttggttgctgatttgtcagctaacttggtcattgccccaacttgtgaatcactttgtaataaggttgttgtgaagtgtttaactgatcttgcttttgttttttgtcctaaaagattctttttaggctgttctgttttttgtgctttacgatattctccagaaattttataaataccattcgttggttgaattgagaatgacttgaccttattggtcttcaattcacttaaaaatgtacttgattgaacttccttagactctgatccagcgttaccgttcatgaagaacgagaacacaccgactaaagccactaagataataatgtaaaacagactattactaaacagtccattctttttgttgttcatacgtgacctcctgaagcttctcatcatttgtgacacagtgaccttttgatactgttaaactataacatatctgacttttattgaccatttatttacccgaataaatttcaggtttcaaaacgccaattgttcccatatttctgtatcgttcggcatagtccaatccgtaccccacaacgaattcatttgggacttccatcccaacataatccgaatgaactggcacaattcgacggcttggtttgtccattaacgtgcagactttaattgagtttgcttgacgtgttttaagaattgccattaagtaattcaacgtgcgcccagtatctacaatatcttcgataatgataatgtcgcggcctttaacactcgtatctaaatctttgatgattttaacttcacctgacgagatggtctcagcaccataacttgacacatccataaagtcgatttcaacatggaggtcaatttcgcgaatcaaatctgtcatgaagacgatcgcaccctttaaaataccaattaataacgggtttttaccttgataatccgctgtaatttgttttcctaagcgctgattaaccttttgaatgtcttctcttgaatataatacgcgttcaatatctttttctaacattgtgccagcctccgtaatttgcttaatcatctaaataacatagtatgtaccgtattttaccagtttgttcgcgattaaacaacgccgaaatccgtaaatccggccggccaagcaattgatttggggtccaaaccgcccatgcattttggcgctttgcctgtggggttttagtatcaatccataaccgttgaatggttttgtggtgtgccttatcaagcattattcgatctgttgcttgtagcgccctgagttgcagtggccattcctctggtgctaaccaaacgacctgttgccgttgaacttgattaggtagatggtcgatatcgaaaacaccaacttgttcgccattttttaaccgcagccattcattaatcgctaatgttcgtgttttgaccaaagaatccactatttggtggacaccaatccgaaaacaccgatactgcttttcaaaaatgatgccattgttcaatgccacttggccttgcggtttctgcgggttcgccaacaattgttgcacttgcattaactgggctgcctttaacgccggtaaagtcttgaaatatcgttgccacaccaattgccagagcgccctttgttgtgtctggttcaagccatcgagttggtctaaacgcccttcaattgccgccggctgttttttgattgccaacaatggcagtaacgccgcggttagatcatcttggtgtgccaccatttgggtcagactttgactgaaccgattggcattttgaatcaagtgtggattttctcgttttaaaagtggcaccaccgcatgtcgcatccgattacgaagaacagtttgttcctgattggtttgatcttcgtaatacctcaaaccaatctgatcagcgtaatcacgcagttgttgcttactaaaaggtaatagcgggcgaattaacgtccccgttttaaacggtctgacttgccgaatcccccgcatttcatgcaattcaccgctacgaactaatttcatgagcaaggtttctagttgatcgtcgccgtgatgcgcggtcaccaagtaatgcgccgattcggttcgcatgacttgatcaaaaaaagcatagcgaaattgacgtgccgccgcttcaacccctgtttcaggatgactcgcttttggccaatgttgaatgcgtaacgggatggcatgcaatcggcaaaactgggttaaatatttttcttcagccgtactttgcgcacgcaattcatgattaacgtgagccacaacgacttggggtcgttgtttttggggcagatgagtcaataaccacaataaaaccattgaatcgactcccgttgacgttgccaccacaaccttgtcgccggcttgccagaactgctctttttgaagatgtgtttgaaatgcttgttctaacataccgattcctctccaacacagacttgaaatgaaataaaggttgccccgaaagtctatcactaaactttcaagccaacctttatcaatttgttctattaactgcgacggccgccacggccaccacgtttaccttctgtattccgtttaatcgttgataagcgatcttcactatcttttaagaaccctgataataaatcatcaaagccttcttttttaggtgcgcttgaatgctctggtttgcgatatccaccgcgattattatttggacgactttgagggcgcggatgttcttgcactttaggttgatcaacggctttgcggattgataaaccaatcttaccgttttgatctgacataaccttcaccgtgacttcatcaccaacggttaaaacatcatgaatatctttgatataactatcggacacttcactaatatgtaccaacccggttttgccttcacctaaatctacaaaagcaccaaaattcgtaatgcccgttactttaccagcaacttttgaaccaacttcaactgccatataaaactacgtcctcctaaatggtcgtttgaactcgtcaaacttttaatcacttaagcgtgatatttaataaaataagtatagcacgctttgcccttgaaacaaggtcgtattctgaattatttttgttgctaatttaaattaggcgccttgtcttggggcaaactgaagatggtttcaccgtctttagaatagtaatacttgtaccgaatgtatttggccaagtaatcattatcatgcagctgttgcacttgaatctttaaatcagattcagttgctttagctttttttaatgtcttttctttagctgccgttgtttctctaatctcggccaatgaatgatgggtttggaaaatctgcacaccacaaattaagacgactaatactgcaacaatccccaagccacataagcggcgtttatgaacacgcttaacatgggctgccttgtcttgcacgattttctgggctgcttgttgctgggtaaatgcattctcgattttcgcaatttttcgactcacttagaagccccccatctcggaattaagttcattatagcaatttcacaaaaaggtcgtcaactaagatcccagattcttaatgacttttattaagatgctcaacaaagtcacaaaaaaaagcaccggcccatattaattcggccagcgctttttccttaatcaaagttttcagcttgtcttgtttccaaaatttcatacatttcagctgcatcgcttttcttcgtagtttcgatgatctgtgtaatgcgtacgaccatcgttttattaccaaatccgatctccagtttatcacccacgatgacattgcttgaagattttgcagggcgatcattaatcatgattcgacccttgtctgcaatttctttcgcaactgaacgtcgtttaatgattcgtgatactttcaaaaatttatctaagcgcattattttgtcctaccttttatttttttcgaaaggcgcaatagttgccggccacctggcatcgtcagccattctcgaatcgagaataattgccaccgtaatgctaatccgccaaataggagcacaccaacgagtacgccaaggcccgtccctaaaatcgcatgtcctctggaactaagtgattgtggtgcaaactgtagcgcaatcttaacacccagccacatcactgcacaaatcgcaagtaacttaccggtaaagcgttgcaaaccaagcgcttgccgtacaatcactggtgattgccgtaaaattaaggctaacacaacaccgaggctgataacagtcccgacactcgcgccaacaatttgatagtgttgcacaagccattgattgattgctactttaacgattaacccaacaattaaggctgccgttgttttatggaactgatcaagactttggagcaccgagttgcaagcattgatcagcgcgatgattgcgatactcaacatataccaaaccaatgcctgattaccatcagcatccccgaataagaaataattaatctgcggcatcaaaaccattaggccggtggttgctgctgccgataaacctaaactgatatgaatcagcgcttcagcaacttgttgaaattgatattgttgccgccgttgccgcgcttgtgacagactcggaatcaacgttgatgagaaggcaagtgacacgactaatcccagctggacaagtggttgcccacggtcaaaaatccccttcatattcttagcaagttcttccgataatccactgaggaccaacccttttttaactgtgaaggaatcaaccagctgtaataacacaattaatgaagcaaagaggcaaattgacccgccttcaatcgctaagcgttttgccaattgttgatacgccttaaaatcgatgccaccacggtgtggcgccttgagttgaaaggcggtttctgctggccgtaataaaatataggttgcaaccaagccgccaaagaaggcgcctgatatcgcccatgtgcccatttcatacactgaccagtgcagtttcaaagatagccacgctgccgccaagatgaccacgacccgcacgagttgctcagcaacttgtgaaaccgccgtcggtaccatattgaaaattccttggaagtacccccgcgtcaccgctagaaacggcatcaataaaaacataaacgataccatttcaatcagcggtgttaatgctggatccgccatcgcccccgcaattttcggcgcttgatactgtaaataaatgaagattgcagcaccaaagatgcctaacagtgcaaatgagcgtcttaacagctgcgtttgttcctccggattgacttgttcagcaaccagtttcgaaatataaactggaaagccactaagtgcaaacgtcatgccaatgccatagattggatagacttgttgatacacgtaaaagccggtgttaccgaccatattttgaaatggaatccgataaacggcacttaataccttcgcgataaacgacgcaattgataaaatgaccgcgcctttcatcagatgttgcatctgtttattttgcatgcctggcctccacttagcgtgcctaatccgttggttgttccgtgtgcttttgttctatcttcaagagacttgtaacaaaagttgccacttcactcaaccaatctgccggttgcatcttcggctggatgacgagtttcacgcttaattgttcttgttcaaacccgaccgttgctttcaagcgggttgtcgataacgcttcaaaaatttgttcacctgaaacaaggcgactgcccttcgccgataaggtgacttgaatgatttctttcgtttgtttgatggtttcgattaacgcgtcatctgcattcatcttcaactgaccaatcgctaataaattagcgacttgatctggataatcaccgaaccggtcaattaaatcggcctgaatttcatcaaaggccgcttctgaatccatctggcgaatccgtttataaatttcaattttttggcgttgatcattaatatacgcgtctggtaagtaagcttccagtttaagatcaatttcggcattcgttttagcaacgacttgcttcccttgtttcttagcgacggcctcacccaacatttgcgagtataggtcaaacccaacagaatcgataaaaccatgttgttgcttacctaataaattaccagctccccgaatcgataaatcacgcatcgcaattttaaacccggaccctaattcggtaaagtccttgatggcctgaagtcgtttctcactaacttccgttaaaaccttatcgggtttatacataaagtaaccgtaagcaatccggctactacgtccaatccggccgcgtaattgatagagctgtgaaagaccgtaatgatcagcatcttcaacaatcatcgtattgacgttaggcatgtcaaccccggtttcaataatcgtggttgtcaccaagacgtcgtatttaccttggacaaagtcgtagatgacaccttctagttgtgcctcggtcatctgaccatgtgcgaacccaaccgttgcttcaggaaccagcgcttgaatctcatcgaccgtgcgttcaatgtcactcactcgattatggaggtaaaacacttgaccattccgttctaattcccgttcaatcgcttcacgcatcgcaccggcattttgttccatgacatacgtttggataggatagcggttagtcggtggcgtttcaatcacagataaatcacgcacaccgagcatcgacatgtgtaacgtccgtggaatcggcgttgccgtcaacgttaacacgtcaacttgtgccttcaactgcttaagtcgttctttgtgttttacaccaaagcgttgctcttcatcgacaatcaacaagccaagatctttaaacttgatgtcttgcgataacaagcggtgggtgccaatcacgatgtcgactttgccctctgctaagcctttgagcgttgccgtcacttctttgcgcgttttaaaccgtgacagtaaaccaatttcgaccgcaaaatccgcgaagcgtgtcagcatgttttcataatgttgttgcgccagaatcgttgttggcactaaaaaggccacctgtttaccggcttcaacagccttaaaagccgcccgcaaagcgacttccgttttcccaaagccaacgtcgccgactaataatcgatccattggacggacgcgttccatatcatgcttgatttcagcggtactgcgtaattgatcatctgtttcaggataggggaactggccttcaaattcagcctgtaattgatcatcttttggaaaggcaaatcccttttcagcctcccgttgcgcataaagttcgattaaatcatcggcgatatcttcaatctttgccgaaactttactcttagtcttttgccactcgccaccgccaagcttattaatcttcggtgttttggcctcggcagagacgtatttttgcaccatattgagttgagtgactgggataaataacttcccattatcccgatacaagatggtgatgtagtcttgatgaaccccatcgacttccaaggtttccatgccgacgtattcgccaatcccatgattgacgtggaccacgtaatcacctggttttaattcgttataactctttaaccgttctgcattggccaaggtttgccgccggacttttttcttcggcgccgtattgaacagttccttttcagttaagaccaccagttttaaatccggtaattcaaagccattttgaagtgacccttgaatgatttgtgtccgccccgtctccaactgagtcttattggcgatgacggcatcaatttcaaagtcgtggaacgtctgatcaatcttcttgacccgtttaggatcagacacgagcacaatgaccgtttgtttttgcttttgccaatgcgcaatctcggttttcaaaagcggcatttggctaaagaattgttgcaccgtccgcgtgggtaaattgttgagtgcatcgagttttaacttccccattcccttttggaacagtgatagatagagatgcgcatgtgtatcttttttgatgagcgcttgggcatccatcatgagtcgttggtctggcaacatgcggtgggtttccaacatatcggtttgccagttggccgcttcttcagtcaaaatccgctgcgtttctaaaatgcgcggatagtcatcaaaaatcactaagccactctttttaaagtaatcaatcagacttgattgatctggatacagataatcaacaaacaacgctaaattctcaacgcgttcaccggccaacaaccgttcaatcggtgtttcaaagtttgtcgccaattgtttttgttcagttttatccgttattttggccgcaaccgcctcataagctgcttgtaatgcctcaccagccatttccaattgtgctgtgttggccaataagtcagtcgccggcataatttgaacactatctaaattctcaatactccgttgcgtatctgcttcaaaagaacgcagtgaatccacttcagtatcaaagagttcaatccggaccggattttccgcatccagtggaaaaatgtcaataatatccccccgcattgcgaactcaccaggtttaccaaccaacttatctcggaaataacccatttcaccaagttgcgcagcaagtgcctggggatcaacttcactatcggtattgattgtgagttgactatcttgccactgacgcgctgtaggtaataaccgccgcatgcccgcgaccgatgtaatcacaattccttttttgcctgttgctaaaaaactcaacgttcgcacacgttccgctctggactcaggtgaactaactgccatttcagccgccatcacttcttcaactgggaaagtgtaaatctgatcactattgagtaaattactcaaatcatcagcaacttgattggcttggaacgtattactctcaataatcaataagggttgttgtttataaatcgtcgccaaaaacagggttttcgctgatcccgaaagccctgtaagtagttgtttaatccctggtcgttgattctttaaaacggattgcacctgtttggtctgccccagcattgtcattaaatccatgtaaaagttcctttactttcttattataatggcgcgaagaaacgtgctctgttttttgaaacgtactttttggttgcaacaacttccgcttaatctaaaatttcaaataatcctaaaacctcgattatttgaaatttttattaatgctctgttgctaaccgcaaccaaacgcactctgtttttgaaacgtgtcattggcagtagattcctgcgctttgctacacttttcaaatcgccgcttgcagcgtcaattcgccaagttaggcaaatgctcagaatctgaccaactgccaacgacactctaattaaacttattcatcgttttcatgaagtcgtcgttttggcaccagtcttctagtgcttcgcatgcctggtctagtgcttgattgataattggtgcgctgtctttgtcaaacggcgttaagacccagttaacgactgtacttttttgtggatgttgaatcccaactttgacacgcttaaattctgagctttggacacttgcgatgatactcttaatgccgttgtggcctcccgctgaacctttttgccgtaagcgcaacttgcctagcgttaagtccatatcatcttggataactactaattcatctaggttaacttggtagtatttcattaaaggcccgactgaacgaccggaatcattcataaacgttagtggtttcactaagaaaatcgtttccccttcatatttaaagctcccgtattcagcttcaaaatcatgcttgtttaaggtcacattaaaccgttcgcataattgatcaatcaccataaaaccaatgttgtgttttgtctttgcatacttactgcctgggtttcccaagccaacaatcattttcattattaacgtcctctttttgactggcgctatcacgcaaaaattctgagcagttaattctccccagtcgccagttgatattaagaaccattataccatattcagtttatttctctctttgtgaaagaaatagttttctgaaaatttaaccaaaaatcgcgaactttggtgtaaattatgctatactggttttcgaaatgaagaattgatttacagaaaggacgtcattatattggcaaacattgaaaaagatcaccaaaaagttatcctcgtcggcgacggcgctgtaggttctagttacgcttatgcattaactttacaaggtattgcacaagaagttggtatcgtagatatctttaaagaaaaaacacaaggtgatgcaatcgatttatctgatgcattagctttcacttctcctaagaaaatctatgctgctgaatactcagatgcaaaagatgctgacgttgttgttatcacagctggcgcaccacaaaaaccaggtgaaacacgtttagacttagtaagtaaaaaccttaaaatcttgaagacaatcgttgacccaatcgttgaatctggctttaacggtatcttcttagttgctgctaacccagttgatatcttgacatacgctacatggaaattatcaggtttccctaaagaacgcgttatcggttcaggtacatcacttgactcagctcgtttccgtaaagacatcgctgaaatggttaacgttgacgcacgttcggtccatgcttatatcatgggtgaacatggtgatacagaattccctgtatggtcacacgctaacatcggtggtatcaagatttctgaatgggttaaagctcatccagaaattaaagaagaagaacttgttaagatcttcgaaagtgttcgtgacgctgcttacacaatcattaacttaaaaggtgctacattctacggtatcggtactgcattagctcgtattactaaggctatcttagacgacgaaaatgctgtcttaccattatctgtatacatggaaggccaatacggcttgaacgatatctttatcggttcacctgctgttattaaccgctcaggtatcacaagcatccttgaaattccattgacagaccacgaaatggaaagcatgcacagttctgcaaaacaattaaaagatatcgttacaaaagcatttgctgaattagatatcgaaactcgccaataagctctttgctgttggtcaaacgactctcatttaatgagagtcgtttttttatggtgttaatattatcaactacatattttttattaaaaataatacttttttatttctttttgggtgcatatcttgtatgctaactattagttaacgcctttgtattttatgtgatactggggtatgattaacctatgcagagattggagttgaggttgtgaaacttacgaagaaagcctacgtcgcccttggcgtagcagccgttatccttgttggaggttactcggcagtcagtcttcattatcaaaaagcattcttgccacatacgaccgttgccggtgtcaacattagtggccgatcagtcgcagacgctaacacagaactcttaaaaaaagtgaatcgtcaaaaatatacgctaaaggataacaatcaaacattgctaacttttagcggtcaagaagctggctttagccataattttaaaccgttattggaaaagattaaaaaaagccaaaacggttggtcttggctaggccacgtttttgccagtgaacaaacaactaaatcagaagacgcactcattttaaatgccgctgattttgacaaattctcaacggaaaccctcgaaaaggtcaacgctaatcgcaaaccttcagagaatgcccatattaacctcgagaatcatcaattcgatctcgtaaaagaagtctacgggaacacaattgatgccgctaagttcaaaaaagcagttgcccacggcattaaccaaggtcaagcaacaatcgacttaaaaaacgattatgcgcaacctgaagtgaaatctacagacaagcaattgaaaaaaactgccgatcaattgaagacgattgctaatgaaaaaatcagctattcagttaatggtaatgatttccaagttcctaaagaagacatccaaagttggttaacgtataacaacggtaccattagtctagataaagctgcccttaccaaatacgtttatcaattaaaagcaaagtatgatacttttgacaaagatttgaccttcaattctacaaaagaaggcacagtcactgtcccagccgggatttatgggtggagtatctctcctgccgatgaaatcaacgccttaatgacagaagtgcctaagggcaaagatttctcaagaacagctgttatccgtggttccggaactgatcagaaaacgcgtagtgtcggttcaacctacatcgaaattgatttaaaagcccaacatatgtggctctatcaagatggtaaggtcacaattgacactgatatcgtttcagcacgtccaccacaagtcaccccaaccggtgtttggagcgtttggaagaaagaacgcaatgccacattgaaggggaagaactttgatggggtcagcgaatacgcaagcccagttaattactggatgccaatcaatgaaactggcgttgggattcatgattcgccatggcaacctaagtacggtggtgactggtataaagaacacggctcacacggctgtatcaataccccacctggcacaatggctaaactctacgatactgttagcgaaggcattccagttgtagtgatttagacgtagtgtactagcaacacctctcctctacggattaaccagaggtagctgacctacagaattcgtttagaaaaagtaagctcaacgattaaataaaaagcagggataaaattaacttttatccctgcttttttattgcttagatttcacgttctttctcatcgattactaatcaagttttcgctgagtcgaaaaactagttattttaatctgcttggtggtatgatatgattacattagtatatgagagaattttaatctaaggagaaagcctatgctcattaaatccctagttttacctaaagaacgtctcaccacaattgttgaatcggtgaccttagaagaagcattacagctactagaagagtctggttaccgttgtgtgcccgtcctagatgctagcggcaagattttccgcggtaacatctataagatgcacatctaccgtcataagtctcaagggggcgatatgcagcttcccgtgaccagtttattgaagaatatgaccaagtatattccagttgacgcaccgtttttcaaagtattcttcaacattaaagatttgccatacatcgccgtattagacgaagatagcaatttttacggaattctcacgcatagcacgttattaaatatgctttctgaagcgtggaatctcgaattaagtagctatgtactcactgtgctttcttctggtgaacaaggtgatttggttgccatgtcgaagattatcgctaaatatacctcaatcgccagctgcatcaccttagatgctaagcaagatgaattcgtacgacgcacccttttcaccttgcctgctggacttgatcttgagattttgaaaaagattgtttataagctcgagaaaaaaggctatcgtgttcctgaaatcgatgatttacaatctgataaggcgctccgtgatgactccaaacttgatgatttagtttaatgcaaaaaagggcagtcctaattaggactgccctttttaatctttatgatttcatttgtgcatcaaagtgcacaactttatccacagcatacattactggtgcggtaatcaccatgatgactgcttctgaaagtgccaacgaaatatacgttggccagaatggaatgtgtgtgctagcagtagaaccggttaacacaatcatccacgcaatcatacacatcgaaacggtgaacaagagaatattgaccaccattttttgccaagtttgttttaaatagggcatcacaagcgttaatacaagcagcgccaataaagtttgcccgccaccaaaaagcgtatcgagtaacttgttttcagaactgaaaaagaaattgaacactaataccccaccgaaaacaccccatagatatttcttattgaagaccactaaatggtttaagccttccgaaattctaaattgaatggctcctgaagcaaatcccaacatacctgggaataacgataaaacaacgtataatgctgccactaacccgtttagaatcaccgtttttaatcgactttgattcgtcatctttgaatcctcctagtttttttgcgtgggatggttacgaaccacgttttttcgaacagctaccatcatatcatatttaccggctgttgataaaggtcaaaaaaaagagaacccgcttttataagcgggttctcttcattctttctttttggtatttatgtattaaggatttaagaccgctttaagtccaacactaatggtgagcgcccgatcgacttgtgccatcttatccgccactaaatgtgtgacgcgatctttcaagcgttgtttatcaatcgttcgtacctgttctaataaaatcacggagtcgcgttcgacaccattatccttggccgtaatcccaacgtgtgttggtaatttcggtttttgaatctttgctgtaatcgcggcaacgattacggttggactatggtgattacccacatcattttgaatgattaaaacaggacgcatgcccccttgttctgaaccgaccactggtgataaatccgcataaaaaatatcgccacgctgtattaattctcccacttgttctccctccaattaggatcaatcaactacgcgaatgtgtgcgtacgcctcactttcgcaagcgttaaattcagccgcaatttgactgttgatgctagccatctcagcgtacccgttaatgacgttatctacttttgactgtctggtcgccatgaattcgtgaagcgcatcttgaatcaaatcactctcatcaagggcatacacctcacaatactgcttaattgcttggaccaactcaacgtctaatttaacggatagttgttcacggttagctttcatctacatcaacctccgaatcaacactttaacctttattcatcctaccacagaactggcgataatcaaattcttaatccttaatgttcatcaattccactgtaaacccgtggtaaccgatcagataaaccacagataatttcatagtgaatcgtccctgcataatctgcgatctcttgtaaagtaatttcgtcatcaccacttttaccaacaaaaactactttggtccccactggatattgcttaggtaaccgaatcatcaattgatccatgcagacccgaccgacaatttcacaccgatgtccatccaccaaaacggttgagccttgcatccgtctagaccaaccatcggcgtaaccgattggaatcgtcccaatccattcagattcactcgcttcataagtcgcaccgtaaccaatcttacttccggcttcaacttgcttaacaaagaccaattctgattcaagacttagcgccggtttcaatgcataaggcaattcaggaatcgcattccctgaaggattcaatccgtacatactaattcccattcgaattaaattctcattgcaagctgagtgccataaactcgtggctgaattcgaaacatgcacaaatcgtggacattctggtaacacggctactagttcattaaaccgggcactttgttctttaaaataagtatcatcgggatcatccgcagttgcgaaatgggtaaaaatcccttctaaatcaaaatatttcgcatgtgctttgataaatgtggctgctgctagtaattcagtcgcatttctaaaaccaattcgccccataccactatccacactcaaatgaatgtgcattggttgtggataaggtatttgttgggcaatttcgtaagcagcttgcaaccattcgagtgagccgaccgtaatggagatttggttggcaatcaccaattcgatttcggtgggctgtgtaatccctagcaccaaaatgggttccgtaaagttagcacgccgtaaagctaaggcctcatctaaaatagccacacaaaatcctgcagcaccagccgcttgggccgcttctgcaacaggaatcatgccatgcccataagcatttgcttttaagacagggaaaatcactgcatctgtgccttttaaatcctttagttcattttgaatattttcataaattgcgttttgatcaactagaatgcgtgttggtcgtaagtagccgactgtcatcgtctcaacctctttccaaaataacttctgccatcactaacgtcgttgtatgcgaaagtgatacgtggacagttccctcaaataaatcttgtttgatgtagggtttgccctttgcatcatttaacgtttcaatcgcttgcagttgtacctgtccaataccagtcccataagctttactaaaagcttccttcactgcaaagcgccccgctaaaaattctaacgcacggcgccccgtataccgtttaaacagttcatattccttagctgttaatactttttcagcaaaatgactattcttactctgtgctttttcaaatcgatcaatttcggctaaatcaatgcctaatccagcaatcatcgtcttcgcccctagtaccctatttttaattagtttaccacaaaaaagacagagactgaacttacatctctgtcacaattgactatatgaaaacagcggccgaccaagttggccgcccgctgtttttaaaaagtcttatttatcgtttgtacgaattgtgaagttccgttttgaacggccatcagtcttcttacggttgtcacgattgtcattgctacgacgtttgctgctatcgccgttgccactgttgcgacgaccgtctttgttgtcattaccacgacgtttgccatcgccattaccacgacgattgccaccgcgatagccgccaccgttaccgccacgacgattgccgccgccattccggttgccgctacgattgccaccttttttacgtgaaggcaatggacgttctggtgttatcttaacaggaactgattccttgctgattgtcttcaaaagcactgaagctaattcaacgtcagagaattgtttcaataattcttcagcttcttcgctgaatttagccaattggcctttttcaatcattgagttgatgtctgcaaccgctgcagctaattggcccttgaaggcttctttttctgtaggtggttgtaatggtaacatccgtttcttcgttaagttttcgatgatgtgtaagtattccatttcgtttggtgttacaaaagtaactgaaacgcctgacttaccggcacgacctgtccggccaatccggtgaacataactatcaggatcttgaggaatatcgtagttataaacatgggtcacacctgagatatcaagaccacgagcagcaacgtctgttgccactaagatatctaaacggccagccttaaatgatttcaagacgctcatccgtttttgttgtgataaatcaccgtgaatcccttcagcattgtaaccacgagccttcaaaccgcgtgttaattcatcaacacgccgttttgtccgaccaaagattaatgttaattcaggtgattgaacatcgaataaacgcgtcataatgtcgaatttttcgaagtcctttgcccgcacatagtattgatcaattaagtcagccgttaattcttttgacttcactttgatcatttcagggttagtcatgaagctcttaccgattttcatgattggtgctggtaatgttgctgagaataaaagtgtttgacgttggtctggcacttgtttgatgatgctttcgatatcatcaacgaagcccatgtctaacatttcgtcagcttcatctaagaccaatgttttcacgtggtctaatttaactgtgcgacggttgatatgatccaataaacgaccaggtgtcccaacaagaatttgtgggtgatcttttaatgagcggatttggcgacgaatgtcagccccaccgtatacaacttgcactttcgctttacggtcgcgacctaagcgataaagttcttcttgtgtttggattgctaattcacgcgttggtgaaatgatcaatgcttgaatgttaggattgtctaagtctaagttttgtaagattggtaaaccaaaagcggctgtcttaccggtaccagtttgtgcttgaccgataacatccttaccagctaatgccaatgggattgtttcgccttggatgggtgttgcttcttcaaagccagcgcgttcgatggctttcataattggttctgataaacctaattctgcgaatttcaaatagtgttcctccttgttttgtaaaaaacatgccattacaaaacaggtccacttcgtcaattgcaccattttcaaaaatctgtcttgtaatataattgttttcaaaagcctttttcattaaaaaagctccttaatagcttatcatgccacaacttaattagcaaacggaattgctccaattgttaatctaattccatagcttcaatcgctaaacagcgtgcctgtgcagttgtctgtcaattgctaatcattaattaacttcagtatcttgtaaagcagcgactactttttctaaatgtaagccatgacttgcctttaaaacgattaaatcgtcaggttgtacctgcgcttgcaagccagcaattaattgcgtttgttcatggcggttaaagtaatggaggcgttctggtgcataacgctcttttaacgtcacatataatggttcaatttcatccccgaacaagaagacctcttgaatcatcgtgggatctaattcttgggccaaactttcgtgtaatttcttgctggcagtaccaagttccaacatgtcgcctaagacggcaatccgccgcccgtcagtctcaaaatggctgaaattgtgtaaaacttctttggcagccgttgggtttgaattgtaaacatcactcaacatccgttcacccttttgaccaacaagccactctgtccgattacttgtgacttcaaaattcgccaaggcttttttcattaattctggtttaatatggaaccgttgcccaaccaaaattgcggccaacgcattattgacattataagcacccatcattggaatcgtaaacgtcatctctggccaagcattcaacttgaatgacgtttcagtttcacctgcacggacttgtaagggatataagtcattggtcgtcaaattaccgaatgtctcggttgtgagttcgccaacccgttcagtcaatagcggttcgtcgccagcgtaaattaatagaccatcttctttgagcccatctgtgatttccatcttagcatcggcaatcttatcacgcgtcttgaaaaattcgatatgggcttccccgatcatcgtaatgactgcgacatctggcatggctaattcactgagcgcttttaattgacctgggcgatccatccccatctcaatcactaaaatttcagtattagcttccatcgataaaatcgtttgtggcacaccaatttcattattaaagttagcttgtgtcttgtgcatattgtactgactacctaaaacagcagctgtcatatctttcgtcgttgttttaccattactaccggtaatcgcaaccactttgggattaattttttggagataatgcatggctaacttctgataagccgctagtgggtctgtaaccactaatacaggaaaatcagttggctgtgcatcatgattggcagcccaaaaagttgccactgccccattttccttagcttgtccaacaaagtcgtgaccatcacgcataccagctaacggtacaaacaaagcgcccgcatttaattgacgtgcgtcaaacgcaacattcgtcacttcaatggttgcccattgttcaatatcgtttttagccccagtgactcgtgcaatttcacccaactgcattttcatatctcaataactcctattactctgtgtgcatttttacgcacgctttttttagttatggcttaaaatactacgcaatattgtaccatagtttcaaaaaagccccaaaaatgattgaccaccaattaagagtaccaccgtgaatagtcatcaacctgtttatcatttggtcgatattgttgcttagtcggactccgccaccctttaaaagctgttttgcgtagtgcatgatcattttgcagcggtggttggctatctaaccgggcgtgttgccgatcattccgattagcataattaaacgattcaccgtttagtagttgccggagtgtgccatcatctagctggtaatggtcaggattactatcaatcagaccatccgcctttactttaagcacttgccattgactgataaatgctccagatggtgctagaataaattcactatgaaaatccggcgtgagtcgttttcgattccaatgcgttgttgggcgctgtccgttgcggtatttattatggagccgagctggttcacgccgcagccaataatgtggctgggtcgcttgtcgttttcgcacaaaccgcgctaaggcttgttcatctgtttcaccagagtgttgaaaataatggcgaatatagcgtagattctgccgatctaaatacattctgaattgatgaatccgtttatcggttaaaactcgaccgacaaatgcacgttgcacactttgcgcaaaggttgctaaaaaaggcgcatctggtgctaattgcgggtcaagttgataatcacgtgctgttaattgcaaaaacgcatgctcatccaactgcgcccctaaatgcgtgagcactaaattgatccgctggtaattaattactggttgtgcagttcggtccccgtatgcttcaaaaagcatttgataaagtgctgagcctacttgatgtaatgcttgccaattgtgttgcaaaatccttttaagcgctgttggttgcgcagcaagttgtcccgttaaatgggttgcataagcgcgtaaactcgcaacgtcccaattagcgcgttctaactgttcaaaatgggccaccacctctgcctgatcaacaatccgataccgctgcggtagtgtttgccgccaaagatccattaattgagtgccatccgttttagttgccagcgttgtgatgatggcgcgttgaatcattgtgcgttgttgcgtcgataatgttagctggtgacgcgcatgcaatgccaataataattgcccacgcacaaccggtaaatcaatcatggtaatctgtttgctcggtgtctcattcaattgcattattagagtagattgtaacgccattaactgctggattggggataatcgcacactgatcactcctcttttcctttattatacaaaaaaagagagggacaaaaatgaattttgcctccctctatataaaacgtgttctatcaactattacctacagctgatgcgttatgtctttaaaacattacatcgctcttaatttagcgactcgttcttcaatcggtggatgactatcaaataaatgagtacccgaccgactaagtcctttaaatggatctgagatatacaaagctgcgcttgatggatccgcagcttgcattggctcactgtcagaaatctttaataacgcattgatcaaaccttgtgggttccgcgttaattcgacaccagatgcatcagccaagtattcccgatttcgcgacaacgccatctgtgcaatactagccgccaaaggtcccaatatcaacaataggatcgaaaaaaccaaaccgatgatattacttgcaccttcttcacggtcgttatcacgactgcggccgccgccccaccataacatgttgctgccgatgttcacgagcattgaaatcaccgcagaaagtgccaaggcaatcgtttgtaaccgaatatcgtaattgcgaatatgggagacttcgtgagcaattaccccctcgagttcctcccgattcaaacgcgccatgatgccagtcgtgaccgccaccgcagcgtgttgtggatcattgcctgttgcaaacgcgtttgggctaggatcgtcaacaatgaaaacccggggtatcggtacttgggcgaccatcgccatgtcttcaacaatgtgccataaatcaggatattcgctagcatcatggacttcggtcgcatgattcatctgcataacaacgttggttgagtttccaatcatcatcgccatataaacggcggctaaaatagccgccaccacgacaccactaatcaaattacgcataaacagataccctaatgcagccccaattgccaatactaaagcaaaaaagccaatcatcacatataccgttttacgtttgttctgttgaatttgttcaaataacattcccaatcacaccctattcaaaggaaactttaggtgctgctttttcctcaactggcgtttctaagtaagctgtcttttggaaattgtgagcacctgccaaaatattaccagggaaagtttgaatttggttgttgtaacgggtagcacttgagttaaacaattgacgtgcatacgcaattttattttccgtattcgtcaattcttccattaacttcgtaaattctgcgtccgcttttaaatctggatagctttctgacaaggcgaaaacgcttttcaatgaatccgttaattgattagaagccgccattgttgcttgccgattatcagctggcatttcaaccaattgattccgcatcttgatgactttttccaacgtgtcttgttcatgcttagcataacctttcacggtcgatactaagtttggaatcaagtcattccgccgtttgagttgtacatcgatttggctccatgcttcatctgtccagttccgactcttgaccatgttattgtaggtgctgatatagaagccaaccgcgccaaccactaacaaaataatgataataataaaccacaacatacgcgtatcctcttttctttaatgttgtcttcatattatcagactcgctacaacaaataaagaataggttgccaaccttaacaaaaccttggtttgacataaatggtaaaattaaagagttaccaattttgggagggatacttgcatgtttactgcacagccagcaattgcgaatgttgatttaactgcaccacggatgattgtcgatgaccctcggattcccatgagttatcaggcactttgtcaaacaaccaatggcggttttttgactaactttagccttcctacgagtgagccaacaagtgatggtctcgccgacgttgagtgtcattatttagctgggattgctcacaacggtgaagcagtcatccaagcccccgacttgcccgattacttagtcccttttagtcagcatcaacagcagtactttgtatttgattgccaacaagcctcagctgaaccaccgattcgctacatagatactgaggtcgatcaatggttaaccgttgctgattcgctggatagttttctcgaacaattaggtcccaaagtaattgatctaaatccagataatgagttaacccctttgcagcgtaaccattacttgttagtggcacagggagcacagctagacactttgctagcccgttatgaatccgatgctgataaagaatggctgtttgattggctactctattttgccgaacacggtacaccagcccaacaagcaagcgcattgactgcctacgacactcagcggttgtactttaaacgccagctgccacgagctaaagatgcgcaactgactgccctctttgaacaactcccacacttaaaagacgcctaccacgcacatcagcaagcgtggtcgccgctttaactttttagaatcgagatgatgacaccatgttgactaacattcgtcaacgtttattcagacgccgcgcacaatgggaacagaacctcgtcgttttatggtttggtaatttcatggccggggttgcttttagtttgattatgccatttatgtcgttatacattgacacacttggcaactttacaacggcccaactgagtttatggagtggggtgacctattctattaccttcttggttaccgctctgatttcaccatggtggggcaaaattgctgaccgccgtggtcgcaaattaatgttactccgcgcctcattaggactagcgattgtcctgggtgcgatgggcttagtccaaaatatttatgaattaattggtttgcgactattacaaggcttcttctcgggttatatcagtaattcaaacgccttaattgccacttcagcaccacaagaaaaaagtggtcaagctttaggcaccctgaccaccggaagtgtttccggaaccttattaggcccgttgttgggtgggattatcgcccaagcaaccggctatcgaacaaccttcttcattaccggtaccatcttgttcatcgtctttatcctctgtctggttttcgttcacgaagacttcacgccagtagaaaaaggcgatcaagtacccggtcggcaactgattcatgaattgaaatacccgcatttaattatcggcatgttcgtcaccacaatgattattcaagcctccaacaactcaattagcccgctgttgagtttatatgtccgtcaattaatgcatcatggcaataacgtagcgttagtcagcggagttgtcgcggctactccagggatcgcaaccttaattgccgcgccgcgttttggtgcacttggcgatcggatcggttccgagaaaattttactcggtggcttgatcttcgccgtcttcgtttacgttccgcaagctttcgttcaaaatgtttggcaactcggtgccctgcgtctgctggttggggtcgccgatgccgcattgttaccgcaagttcaaacgattcttgcgaagtactcaccccatagttccgccggacggattttcagttataaccaatccttccaagcaatggggaatgtcgccggacctttaattggttccagcgtttctggcctattcggttacagcggggttttcctatcgacaaccgttttagtaatcgtcaacctcttctgggtgcgtcagaatacaaaagtcttacgcgaagaacatgaaatacaaaaataatacaaaaaagtggtgtcgctcattttcagagcgacaccacttttttgttgaaacgtgctttttgtggcatatttctgcgcttaacagaatttgccaaatcggtgattacaatcgccaattcgtcaaatccagttaatgctcaaaatataagcgccacaaacgcactctattttttggtaaacatcagtttatctaaccagtcccggttatgtttaatacagaaatagccgataatggcgattaaacatgatcccaagacatccgctagtaagtcccccatcgtgtctaacaaggctgcttggcctaataaaaggtgaccttttgccatataacgttgcatgtttaagcctaacaaactatcgccggtaaattcatagaattcccacaacacaccaatcgtactcccaaacgttgccgcaaacaaactcatgagtaaggctgaaatggtttgacggagttgttttgaaatcaatacgttaaagaccgtataccctaagcccgccaataacccggcactcaagacatgcaagaatttatcccagtagtataagcgactataaaaatgtaatcccgtccccaataaaatcgaacagtatacaaagattaaataaactgcatatagaatctctggaaaccggtatggcataaagcgttcaatgataataggtaaggtcgcaatcaccaggcctgcaaccacttgtaaaacggcaaaagacaatgttccgttgtctttggggttagtcagcatttgttctaagtaataaccaatatagattaattgactcacaatggtgaagacataaagccaatctacccaccgccaatttgttttttgttttgccatgttattcatcctttccattcaaatgatacagcgtgacactccgactaagtcgcaagtatgcgatgaaatgaaagatattgcccagcaaaatcaacagtgcccctagccagctattaatctgaattccgacaatggcaatggcgtaaatcaagacacttcgtaagggatcatttttaatcgtttgataaaattcctcgtgtcgctgttcatactgacgcattagttcatgatgcagtgccatataccgatataatacccaaaacaaagctgagatgactaatgcaacaatcgcatacgatgtaaaagcaaatcgaatatcagcgccattttgttgagcaatcgattccgacaacaaactagttgggtaattaatcagtgtcactgcaaataaaatactgagattgatcacgtttaactgccagttagtttgttttattttcgcaaaataatcgtgatgaaacaaccataatgtccccacataaaaaaaggatagtacataggcagccaaagttggccactgtgcaatcaccgcttgactcaaatgccctgcttgatagtccggcactttaaagtctaacactaatagtgttaataaaatggcaaaaacgccatcgctaaatgcttgtaatcgatcgattttcattattctttccctcacaattcgactatggtcaaactagcgtgggtagtgcataatagttcataaataattcccttaactaggaggctctatgtcatcacctaccactaaaaccacgcagtttaaaattatttttgttttatatagcttacttttaggattgttgattggtggcatagcggccgcctttttagccctcattaatttcagtacacacttaatttggcaagtcggttattcgcatttcaaccagccattttatccgttgcttgttggtctatttggcggattactcgtcggcttaatgcaacgttattgggggccttatcctaaaacaatgcatgaaacactcagcgaatttaaacaaaccgggtccgttgcctaccaacagcaagtcggtaaaaacattatcgccgccttagttgtattagcctgcggcgctagccttggccctgaagccgcgctctcgaccaacgtcggcggcctaatcacttggttgggcgatcgacttaaactaaagaaacgtttttgacgatggggattggtgccatgctagcggccatcttccacgcaccgctagccggtgttggtgaggcgattgagacaacctccttgcgcgatcatttcaaatcacacttcaatcaagttctattatacattctcacaaccgcaactgggattcttggtttcgccttggtcaaccaactcttccccaaagaaagtccatttacactgcacacaccaatcattcattggacattaatagtttggccacttcttattttagcattaattgtcggttgagtttttggcaatctattcttaaaaatagaacaatggtgccagtggctctttgatacgattcagcggccggtcttacttgcaatgatagctgctggtgtgttcttgggtgcttgtggtctattgtcgccttatttactcttttctggagaacactacttgttcacctttaccaaatccggtttagatcaatcattcatttatttactcttaatcggacttggaaaaaccgttctaactaatctgctatttgcctttggttggcggggcggtaaaattttcccagccatctttgcaagtgcggcaatcggtttaagtctcgccgttgtattgccatacactcccggcctcctggttgccacggttgtcgctgtcagttgtacggtgatcgtggcgcaaccgtacgtcactgctactttgttactctttcttttcccgattcaatttttcccagtcattttgctagcgtgtctcgctagtcatcgaattcaaaaaatgttgattaaatagctgattgccgtttgcaattggctatttttatggaaaaaaaggcaaaaaaaaaccagggaaaaattccccggtttcaaaataattatttggcagcgttcttgtctgcaaaaccatattttttgttgaaacgatcgacacgaccatctgcttgagtaaacttttgtttacctgtgtagaatggatgtgaatctgatgaaatttcaacacggattaatggatatgtgttaccgtcttcccattcaacagtttcagctgagttagcagttgaacctgagatgaacttgaagccagttgatgaatccataaatactaccttgtgataatctggatgaataccttgtttcatgtcttttccgctcctttttgctaaagttatctgcatcaattcagatgcacaacttaagtcttgccctgagatatttgctatgtcagagatatttgtttacataaccattaaatattagcatgaatgctaacaaaaaacaatagatggttaacttattcttcaaccattttgacgattgcgcccagacccgttagtttatcaacaacgcggtcatagccccgcaaaatattacttgcgttatcaatcgttgtcacaccattggccattaagccagcgatcattaaacaagcaccgccccgaatttcatcggcggatacttcggcaccttgtaacttgtcggcatgatgtaaaataatcacatcattttcgattgagatatctgcacccatccgaattaattctgggacgtggcgtgttcgtttaggataaagggtatcaaccacaatgccttcaccttgcgcttttaataagagcggcgttagtggttgttgcaaatccgttgcaaatccaggatatggcatagttttaatttgaaccatttttaaattaggtgatggataaacgaagatactatcttccttaacatccatcttaacgcccatttcctctaacttagcgaggtaagcgtccatgtgttcactgatgatgttcttgacgttcacgccatccccgatggctgcagccatacttaaataagttcccgcttcaatccgatcgggaataatggtgtgtgtattgcgcccatacagatgttcaaccccatcaatgcggataatgtcagtcccagcaccgcggatcttagcacccatgttgttcaagaatgtcgcgatatccacaatttcgggttcgcgtgctgcattttcaatgacagtttgtccttcagcacggacagcggctaataataaattaatcgttgcgccaactgatgccatatcaagataaattttagcaccgtgtaagccgtttggtgccttaatttggatagcaccgtggttattagtcactgtcgcaccaagtgcttcaaaccctttaatatgttgatcaattggtcgtggaccaatatcgtcgccacctggcaacccaacgattgcttccccaaaacgacctaataaagcccccatgaaataatatgaggcgcgtaaactttgaatcttcccgcttggaagtggtgtcgaaataatgtgggttggatcaatttcaaccgtgtcatcaacaaaagtagatgagacagacatatcttctagaatggatagtaggctgttgacgtctttaatgtgcggcacacagtctaaaacgactttcgactccgccaaaatagcagcgggaataatcgcaaccgtgctattctttgcaccgccaattgtgacctctccagataagagattgccaccttgaattaacatttttttcatttttagatttccccgttcgctctgcaacaaaagaaccgccttcagtttcccacttttcctgtggtttaaaccagaaggcgcttttgatatttttaagtttttagttttattttttaaaattggaaaacggcttcaatctactcaatgccgttgataattagtcatacatgtataataataattaatcagcacataaattacaaggcatttagggataacatttactttttaattttcatacttagtaaaagctaatcatcgcattcaattgggctatcgaagtctaaaaatgtaaggcttttcaaaacggctcatctccattttcacaactatttttcggtatacaaaaagacgctactttgtcgtgctgactagtagcgtcttttatgaaacgtgcttcctcgaactgccttttccggttaacctaaaaataaggattatggctaaagaacgccataatccttattttcttgttaatcctcaaagccaacccgttcgagtcagcactctacattgttgcgccaataaatgccttgaacaagccttctggtttgtttgggcgtgataggaattctgggtgatattgagctgccacgaagaatttgttttctggaatttcaatgacttcgactaagcggttgtcaggtgaagtcccggcaaagactagccctttgtctgtcaacaattcacggtattcgttattgaattcataacggtgacggtgacgttgttggataacactttggttatcataagcagcagcagtctttgtacctggttttaatttacatggatacaagccaagacgttgtgtcccacccatgttttcaagatctttttgatctgacatgatgtcgattaatttatgttttgcttctgggtgcacttcaccagttgtggcatctgtaatcccagcaacgttgcgggcaaattcaatacttgccatttgcatccctaaacaaataccaagatatggtacatcattttcacgcgcatattgaattgaaaggatcatcccttctaaaccacgatcaccgaaaccaccagggacgataatcccatcaaagccagctaatgtttcagcaacattttctttcgtaatatcttctgattggattggtgtcactttaacatcggtgttataagcataaccggcatgacgtaatgcttcgttcactgaaatgtaagcatcttgcaattcgatatatttaccaaccaaggcaatcttcttcgtgccttcgaggttcttgattgtgtgtaacatatcaatccattctgtcatgtcagcttctggtgctgtcatcttgaagtggttcaagacaaaatcatctaagccttggttcttcaataacaatggaatatcgtagattgattcagcatcgcgtgattcaacaacggcttctggttcaacgtcacagaattgggcaatcttgttccgcatgtcatcaggaattggtttttcagtccgacaaaccaagacgtttggttgaatcccgatgctccgtaattctttaacactgtgttgtgttggtttggtcttcatttcaccggcagccttcaagtaagggaccaatgtcgtatgaatgtagatgcagttttctgcgccaacatccgccttcatttgacgaagtgcttctaagaatggtaaggattcgatatcaccaacggtcccaccgatttcagtaatcacgatatctgaatcagtcgttgtagcagcccgcatgattttttctttaatcatgtttgtgatgtgtggaatgacttgaacagttgcgccaaggtattcacctttacgttctttacgtaaaacttctgaataaattttacctgtcgtcacgttagaatatttatttaaattattatcgataaaacgttcgtaatggccaagatctaaatcagtttcagtaccatcatctgttacgaaaacttcaccatgttggtaaggactcattgtaccgggatccacgttgatgtatggatcaaatttttgaatcgttacctttaatccacgattctttaacaaacgaccaagtgaagccgcaacaattcctttaccaagtgaagaaacaacgccacctgttacaaaaacatatttggtcatataaatattctccttttcttcttagcattacgctaaacattcatgcttttgggaaacaaccaaaaacaaaaacaagctccctattcaaaatgaacagggagcctgttaaccgattctggcttcgcaattaaagtaactgcaaagcgcccaaagaatataatacaagaaatggcaattagcgtcaagcaaaaaaattagtcatttctgcgccgattttaaatcgcctatgctacactatttgcatgacctactttgaaaggatggcccaccatgctacaagacgcgttactagctctagatatcggcggttctgccgtcaaatatgggatttggacgaaacaccaactaattaaccaagcgcaattccctacaccgctaacacgcaatcgcttctattccgaagttgaacaattacgtgatcaatttgcgaccgactttcatttaactggaattgcggtgagttgtcctggtgatccagatgaacagactggcatcatccatggcatgagttatgtgccatttttgcacctcggtgaatttcaaactgaatttgcaacgcgccttggtctgcccgtctctctccaaaatgatgccgacagtgcagcactcgccgagatgacagctgggattggtcaaggtcatctgagcgccttattcacaataattggttctgggattggcttatccattatcgaaaatgggaccattctcaaaaccactgctgataaaatcgataacttcgaaaaattcatcgcagatgccattaaaacactcaacaattcaaaagtctcacccgtccaaattggcaagactgtctccctccgtaattttaaactccccaatacaatcgatggcaaaaccgtcttcgaacttgccgatcaaggggatccgattgccacccaagaagtcacacagatgtatgctgcccttgcggaaatcatgctctttttaaacgttgcttacacgcccgagattattggtgtcggtggtggcattagtcagcgaactgacctactaccaaaattaaacgctgcgattgacgcacttttagccgatgacaatagtagtattaatcgttactggcaacgccgtgcaggggcaaccacccctattcctgtgccacacatcgaaatttgtcacttcaaccaagacgccaacttaatcggcgcggtttaccattttcttgaacgagagtgtgtcgtaagtcgggtatccgacgaggattagcttaaaaatattaaacgcaaaaaaaagacgccaaagttaactttggcgtctttttttatggcaacgaatcggaaacgtctaattaaagctcgtcatcttcgtcttcttcgtcttcatcatcatcgctaaattcagataattgaccttcgataccgtcttctaaggcatcgtcgtcttcatcatcgtcatcgtcaccgatgttttgtaagtcagctttgtattcagttaagtcatcaccagcaacgtcatctgtagctgctaaatcaacatcatcatcagcatctaagtcttcgtcttctggatcatcgtcactgtaatcaatcacatcgtcatcgtcggtaacatctgctaagaatgcattaaccttcttacgacgtttcttcttagttggttggtcttcttcatcttctggatggttaacttcttcatcgacagattcatatgggtaccaagaacggaggccccaaacgttttcgcctaaagaaatgaaactaccatcttcatttaaatccgtataaaattgtgataagcgtgcacgcacttcttcatcacttttgcctaaatagttttgaatttcattcgttaagtcagcgaatgcaatcgtgtcgcctttttcttctaaaattgcatgtgcgacttcaatcattgatagttcttctttattttggcctttaaaaacgtctaatttcaaccagtacacgtcctttcaacagtctatccttaatcatactagcttaagctgtaaaaatcaatcgtaatttgtaatcccccacggcttgattattgatggcaagttggtaatgaaccgtaatttcacctgataacggttgttccttcaccatcgataataaatgggttgtcgttgtgagcactggcatgttgccatattttgtttggtaaattgatccgaggtcttcaccttgcttaaagtacaaccgcaattgcgtctcgtcttcttctgtgccccgcgttaattgaatttgaccgtcagcagccaatttaaaccgtaccgcggtggcttgttcaccaccgtgttccagataacgtaagtaaagtgactctcccattttgacaacttgaccatcctcatcgaaaacgtgtttttcaagttgcccatcttgttgaatttgcgtttcaaggtgtaccttgaccggaattccgctttgacttgccataaataacttcctttaattttaattaagtagttctattataagccattcaaaatttgagcgccagaataatccgccaattctctttgaccagcgtaccgattgcagacagcgcctagaatttacgctataattaagaagagtttttaattttcggaggtgattaccatggatgatttagcgactttatctgccaatcaagaatgggctattttaacccaacattttgaaaaagcggctggaccactcgcttttgctcatgctaatagcctcttagctttgagccgcgaattacaacaacctattattcatttttggacgcttgctgacaatgttattttgggcatgatggatacaaagttacctgcttatccacaagcggttgccacattagaggctgcacactatgcccatttcgtgcgtaacgctggtggcttggggattgtgacggatgccggcgttttgaacgtcagcttctatcttcctgatatggcggatcacctaagcattaatgctgcttacgcgctcatgcaccaattgttcacaactgcctttgcagactatcccgtcacgattgaccatttcgaagtcactcactcctattgccctggcgaatacgatctcagcatcaatggtcaaaaatttgccggtattgcccaacgccgtgccaaaaacggaattgccgtactcttatatgccagcattacaggcaatcaacaggcgcgtggcaaactcatgcacagtttttacactgctggccaagcacaaagccaaacgcggtggactttcccagcggtcatcccggacaccatggccaacctatctgatctgttaaacgaaccaatgactgttgcaacagccattacgcacctacagaccgcttttagccggttggttcaacaaccacaactagttgacctcacaccacaattacaaacgaaagcttatcaacaactactacttaaaaaacaaacagcactccaccgttatcaagtttaacgggcctcaaaaaggagattatattgtgactaacaccgctattaaactatcgcgtgaaaaagtattccgtgatcctgtgcataactacattcgcgtcgagtatcaagtgattctcgatttaattgacacccccgaatttcaacgtcttcggcggattaaacagcttggcacgacttcctctgttttccaaggcgctgaacattcccgcttcacccactcattaggtgtttatgaaatcacacgccaaatctgtgatcaatttcaacttaactaccctagtcaagttgccggtgatggactttggaacgatgatgaacggttagtcgccttatgtgcagctttattgcacgacatcggccatggcgcttattcacataccttcgaacacatcttcgatactgatcatgaattgattacgcgccaaattatcaccaacccggagacagccattaatcgcgtcttaacccaagtcgcggatgatttccctgcgaaagtcgctagtgtaatcgatcattcttatccaaatccacaagttgtccagatgatttccagccagattgatgctgatcgcatggattacttattacgggatgcttacaatactgggactaaatacggagaattcgatttgacgcgtgttttacgagtcatgcggccttacgataagggcattgcctttttagcaaacgggatgcacgccgttgaagattacatcgtcagtcggttccagatgtatcaacaagtttattttcatcctgtttcacgcggcatggaagttatcttgcaaaagctcttgcaacgtgcgaaatttctttatcaacagcctgaccatcatcagagtctcgcaccgcaattattgattccatttttcgaacagaacttcaccttacaagactatttaaaattagatgatggcgttttgaatacctattttctatactggttagactatccggattcagtgctcaatgatttggccgaccgctttttaagccgccgcccactcaaatcggttgcctttagccaacagacccaacgtgttttaccagaattacgggcgctaaccgagcaagctggttataacagtgagtattacactgctgttaataacagtttcgatttgccgtatgacgcctatgatccctccgctaaatcacccaaaactcagattgaaattatacaatctgatggtcaacttgaagagttatcatcattaagtgacttggtggccgccatctcaggccgttttagcggcgatgaacgcttctatttccctaaagaaatgctcaacgaaaatgatatcgaagtcttcgcaccaatataccgccagttcaaagcatacttgcgtaacggtgcaatcaatcctaaccactaaaaaggagtttttataatgtcaatcaaacttgtcgctgtcgatatggacggcaccctattaaatgaaaataacatccttagccctaaaacaatcaaagttgtcaaagctgctaaaaaacatagcgttaaagttgtgctatgtactgggcgaccactcaccggggtcacgccttttctaaaagaactgggtttaactgaagccactgactatgtgattacgttcaacggtgctttggttcaaaatacagcaactggtgaaattctagtgcgtcacactcttgcgcgtgaccaatatcttgagcttgaaaccctctcccgccaaattggttctcatttacacgctgaagacgatcaattcatctacaccgccaatcgcgatatcagtccttatacagtcggtgaaagtgccctcgtcaacatgcctgttcgtttccgccatgtcgatgaaatcgcacctaacaaggccttttcaaaagtgatgttaatcgacgaacccgccgtcttagctgaagccaaaaccaagattcctgctgattttttcgatcgttatcaatttgttcaaagtgaagcctacttcctcgaagtactcaacaagaacgccggtaaaggaaatggtttgcgtgatttagcaaatgccttaaatattgatcaatctgaagtaatggccattggtgatcaaggtaacgatctatcaatgctagaatacgccggcttcccagttgccatggataatgccattcctgaattgaaaaaaattgctaaggttgttactaagagtaaccatgaaggccaagatggcgtggcatacgccattgaaacatacgcctttgaaagccaagcctaatcataaggggagttattatgactacgttaattgatctcgtttacgcgtcaccccttttctttttgattttattcattggtttacagcgatttgaaaaacgccaattaatcaacggcattgtatttaactttttcctcttcagcgcattaatggatgctgcgctcattgtgattcgcctcaataacgaaacgctgaataacattgcaattgctgctgcaattgttgtcgttctaatcgtcatgttcttctacttattcggtattgtcttgttgctgtggaacgcgtatattgtctggaaaaaagaaagtcacacgttatccaacatgctgaccctcctcattgcgttagccatcattggctcatttttcatcccaatcatcacgcgcttgttacacattcccgccgatgttaaattatttgtcagcacgattgtatcggtttttcttttgtatattccattgttcttctatttatatctaacctcactgattatctatcaattcaaccgcccccgttatcaacaagattacatcatcgtcttgggtagcggtttaatcgatggtcaattcgtcccaccgttactggccagtcggattaatcgcgccattcgattttatgataaacaagtcaaaaaaggccgccctgcaccaaaactggtcttttctggcggccaaggtccggatgagaagctgcctgaatcagttgccatgcaacgttacgccattgagcaagggattccgattaaagacaccctcaccgaggaaaaatcagtcaacactttacaaaacatgcaattttcaaaagacattatcatggctgataccactaaaacgaatcctaaaattatttttgcaaccaataattaccacacattccgcgctgggctttttgcaaagcaagcccgtttgaaagcagatggcattggcgctaaaacatcgcgttacttcttaccaaatgcaatcatccgtgaattcattgcaattctcaaaatgaaacagcatcaattcattttagtcgcaattgcaagtgtcgcatttgcagccttaactgttttactcaatcatatgtaacgtaaaaagccgttgtgattattattagtaaaaatatgactcctaacaagcaaccgcagccgatgttgaaaaagaagctcaaaacgctccacacaaaaaggacgcataatataaacaggaatgtcagcatcattgccacctctttatttgcaaaccacgctcacttttaccggcttagatcaactttttcattgatcagccacacaacaatgtcgccaattaaaaccacaacaaattcaccaatgccgactgtcaaatatgtcatccaaaacaaaacttcactgaccagatgtaattctagtgcgactgcctatgacattccggccccattgatgactataaattagcaatcaaacacccctcatgtaacgtttgttgaaaaccaccatagtattgagcagttctgacaaacgaaattgaatcggtctataactcaatggtgtaaaagcaaacgttaaaactacataaagtgcagcaatcaaaactgttttagtgatctcagcaactttattattaagacgtgccctttttaagaatctcctagtttttaggtgggatggtcacgaaccaccatgtaacaagtaattattccattaatactgtactttcaagtatagaaaaaagacgaccgtttatcaacctgaaaagcatgttataattttactattagacattttaacaaccgagtaactagtcgctaaaaatcgtggatcaactaactgtctagcctaacaaatatttgacacgacccacgaaatttatacaatgaatggatattactaatgaaaatcgctattttaactgacagcgctgcgatgatcagcagtaaagtcggatcacaaccgaatattagggtcttacagatcccactttcattggatggagaagcttattatcccaatgaattaccagaagttgctggaatagaaacgctaagggaagccacgcttaacactgtaacagaagagcagatccctctaaccacaatttctgcagtaaccgatgaacttcaacaagctggttatactgacgtactttgtatacatattgccagttcgatcagtggcttaggctcaaatctctctactttcgccaaaagctgtcaacagccgcttaagatccatctctttgattctcatactcttggtcctgcagaaggagcgttggttgaacgagcacttactatgattactcacggactaaaaattgctgacattttagcagaactaaccaagtatcgccaaaagcaacatacactggtcataatggaaaatctcaaaaacttgcgtcggatcggttctatttcaaataatgcacatctcttcagtaataatatgctgcattataaaaccttgctacatttttccgaaaatggtgaacttgaagtcttgatgaaaagttcacgcacgaaaaaaattgcaacggcgctattgaataagtttcgcagctctgcagcaaaaccggaactagcaatcgtggcagacaatacaatggtcttggaaaaatatgtttcttgcctgaaagaaattatgccgcaacttcaactagtaactgatctatattcaccttcgatattttccttcatcggtccacaagcactgatcattagttggcaaaataattaactacatgcaaaaagatcgtccttcaatttaaagaagaacgatcttttttgtttgcagttctcttatattaactttttgctatttaataacggactcgcaattggccagcttctcagctttctgcttagttatctaaatcaaattgacccgtcagtttttgcaactgagcagcagtttcttccaaggtcgaaacatgttgggtaaactcatccatcgtagcttgcacttcttcagagttagccgaaacttcctctattcctgctgcgttttcttgtgttgaagctgagatgctttcaagtttatctaagatcatcttttgagtttcactgatctcttttgtaccctcatggatcttttgaacatttgcacccatagcttcattatgcttataaacgttcattgtcgacttgatggcttctgtgatcaaaccagtctgtttttcactgctttccagtgagtctgttgttgtcttgaccaaaccagttgattgctgtctgatctgttcaatgatcgactcaatttctttagtcgaatcattactttgttcagctaacttccggatctccgctgcaacaactgagaatccttttcctgcttcgcctgcactagccgcttcgatcgatgcattcaaagcaagcaagttcgtctgtcttgcaatatcattgataacgttaatgatcttagtaatgttttgtacatcactatccatttcctgaacactactcatcaaagcttgcattccgttgatctcatttgaccagttaccattgaccttgtccatgacatccaggttattttgtccaacttttgaagcttctttggatgaattagcaagctcttccatattcgcattgacattatcaatatgtgcagtgattttttgaacgttatccacgctttcagtagtttcttttgcttgtgatcctgtcacttcagcaatttcagtgatcgtctgtgcgatttcttcagaagcagttgctgtttgtttcgaaaggtcaagtaatgatgcagctttttcagaaacattcttggcttcttgctgtgtttgtccgatcagaacagtgacagaagcgatcatattattgtaactagccgctaatctgttaaactcatgtccattcacatcagctctggtcatcttttgagctagacgttctattggtaccttagaatactcgattttttcacccactgcaggcacgtaactcatcttaccttggccagcatctataaagaacttctcaagtattaataaagcacgtttgagcaaacctgcactatagtaagatattatcacggctaaaatgatgatcgccaacattgagattgtcaaggttatcaacatatgatgtgtgcctgcgctcaaatcactattgttcatttgggcgatggtccaattgtcagttgtgccattgcccttgtcaaaggtaaccttattgatctgcgaacctccaggaactttgatcgtccccttctttttcgctgaagcagccactgctttataaacggctgtcttgttgatcattttacctgctttaaaagtattattgcttttaccagtgttctttttgatcaaaaccctgccggctttagttaaaacggcggcttgaccattgtttccgatttccatcgattcaacagatttttgtactgatgaatatgaaacagtaactgctaaaacatgggctttcccctgcttatctacgattttctgggaaacacttgcactatacgaatgattagccggatctttataaggaatcgaccaatatgcatgtcctgtgggtgctttttgataccaatcttgatctaaaatattcatatctttaggcatcgcaaaattcgaataagcatatgtaccatcagtgttgacatacatcaagttggtgatcgttccctgggcgtcgccattggcaattttcaaagttctgttagcatcttttaagttgacattattggtcaactctggtcttttttccaaactagcaatttgtccagtaacatcttgccgcatgtcaacttgttgccgttgcaaaacatttacagccgtcacttttaaacggtcatttttctcgatcaattgctgacgtgtattcccgtatgagatcaaattcattataattgccggtaccaatgctatcaataagagtgacgataaaaaatacttctgaatactctttttagcaacttttttcttacttgccattttctttccccatctttccctaactatctaatttgatcccctaaggatctcatgactatcgttcacaaaagcactgaagcaaacaacccctaaataatatgtttgccagtatttgcttttgcttgcgctgaagtcatcaaattaacgagcaattactgctcttttacccctttagccccactaaaacaaaacataactttaacgcagataatctaatatcgaagtttgcatgaccttagtccccatagccaaggtcgaacgatatgcaatcatttgattttgatattccatatacttctctgcaacatcaacatcttgtttattagacaaagtttctgctaaagtatttttctcggatttgttccgagctgatgctgaacttaaacgattttcgatcgaaccgaccttagacctatagtcagtaaagttttcagtaaatttatcgatccctgacaaatattcactggataactttctatcaggatcccccgatttcaaagtatcaatcaaaccgctaaagaattcggtcagttcagacttgctatctttatcaatgccagacgaaccatcggcatgcatcaaacgtgaaccatcagtagctaaatctaagctgacaccatctgagatctcgcgctgtaaattatccacgttgcctctgtattctaaactgacagctgccccttcagcatctttaataacagcaaatggtggctcttgtgtctttgtccccccaaagatatacctgccatcatagttggtattcaaggcatcaactatccctgagatcgactgtgagatttctttacggttcgcattgtaaacggcaggtgtagctgttccgctattggccgacgactcgatcaaatttctaatgttaagcatcaaggtcgaaacattatctaaagctgagtcttgcgtttgcgaccagagcgtggaatcagaaattgtttggccatacgttttgttttgtgaaattgaaacattcagatctaagatctttgcgactaacaaaggattatcagaagccttattgacctctttcaaactagacagttgattcattgtcttttgaaccttgttagtactgatctgtaaattcttcaagaaatcagaatattccattttactggaaaccctcattgattaaacccccgttctattgatcaaagtatccaacatttctgaaacgacatttaacaatttggcattagcttgaaaaccttgttgaaatctgatcacatctgacatttcttcgttcaaattaacaccagaagctgcttgatctttgtattccaattgattcaacgctgataattgagcagatgccatattgtctgctttttgtttagatatcccattttttgtcacgatactgttataggcacctggaatcgttaaaccatcttgagaattattgaaggtcaaagtacccttattataattttccaacaatttcgccgtatcaaccggataatcaagcttactcttaagcgccttagccatcgctaaagcacgtccattatctccttcggccggatcatcaccagtaccgactttcattttgcctggatctgcgactaaatcatcgttgatcttaatacttaaagccggatcactgggatcggtgatttcaaaaaagccgctatctggagtttgcccgtcagaataaacgatattttcaatttctacaacgcctttagcaaaatcatttaattcagctcgatggctttccacttcagccaatgattcttgcaaaccgccgatcgaacctgacttaactgctaacttgctatacttacctgaaccgttcgctgtttcaaaaacgacttctccgaccgtgaagtctccatcgatcgtttgctttggttgtgtttcatcaccatttggcaaaatctgagctttgccgtcagagttactgacaacaacatttaacttagtctgtactcctttttcattgtcaaccactgcatggtcaccgatactaagtgaagcacggccatatttgtcaaacgaaactgttaaattactttcagcagacatatcctttaataaactatcgcgctgatctaacaaatcattgggctgttcatcacttaaatgactgtcatacaactgttgattcaaattagcgagttgttccgccttttcattaaaatctagaacagttttcgccaaagaagaacgtgtatcagtagaaacttgtgaaacttgccgtgcagtttgctggatataagaagctaaagcaacacccatttgaacactattagttttagccgtatccaactcgggattgtcggctaacttttgtaagctgtcagcaaaattattcaattgtgtaatgagtccatcgtctgacggctcatgtaatgcattttctaataaagccaaaacatctgacttttggacgttaaaattgtaatctgaattagaatctcgaacctgtgaacgtacaaagtcatcaacgatccgtgagataccatcagcttgaacaccgctaccgatcaaaccgactcctgtttttgcataagggatcttcgttgataaatcaacacgttggcgcgagtaaccttcggtattagtattagcaatattatgactgctagtctgcaagccgatttggttagcatctaacccactgcgagcagtattcaaagtaccaaataaacctgacatgaaagtcctcctaaagaataacaaggtgaagtgaaccgcataaaagttgagcactatcggactttgacaataagtcgtggtttgcgacttgttggcgaagttggataggcacagacttttggttcacgcaacctgactaagaataacaaggtgaagaaatgcggttagaagccgagcattaacggactttaacaataagtcgtgcatttagcgactttttgttgaagttagttaagcacaagcttttgcatttcgtaacctgactaataacaaggtgaagtgaaccgcataaaagttgagcactatcggactttgacaataagtcgtggtttacgacttgttggcgaagttggataggcacagacttttggttcacgcaccccttctacaacctaaaatgactgatctacgattgccgcaggaatatcttctcgcttaggttgactttgagtcctatgctgatcaacataagtattttcctgtttttccaagctgtgttggatcgtatccatcatttttttctgataagccaaggcttgttgcgtcaacaataaattagtttcttgcaactcttggatttcttgaatcagcatctttgttttgtcgccaatttcaccagtatacttctcaaaaatcggtaagaaatcttccttttgcggaacaatttcatttagcgattctccgtcatcaagaactaaaaacttttgttcacgtttcagtattttgataaataatttaagcttagcctgaaatgccttttcattcatctttatttccttcttgtttcatttcctggaacatctgatcagcaatcttttctggtgagaccttatatgttccgtttgccaactgctgtttgattttgtcgaccttagccgcatccacatcatcgtctatatcacgatttttagcgttgtttactaatctttgagcagtatctgataatttaacattaaactgttgtggtgcaccctttttcgttgttttcgaggcttgattgtgatagtagttttggatcatttgtgaattgattgaagaaatatctcgattaattttcatgtgaatgcctcctttttcctttttgactctacaaatacagttatcggccaaaataaaaaaagttaaacctaaaagttcaactttttttaacttaatttattttattgatcctttgtttttgagaaatgatcttattgatccgcacgccaaagttttcattgatcacaacaacttccccagttgcgatcaattttccgttcaacatgatctccaaaggttcgtctgttaatttatcaagttcgataactgaaccagtgttaaagttcaaaatatctcgaacagtctttttagtccgccccaagacaacgcttaggtttaatggaatatctaagatcaaatctaagttatcaccgctgatttcttggtgactcgacaattcttcaaattcgggtttagaaatttccacgttactgacctgcgcctttctttgtggttgttcattgcttggtttttgcgggatcttaacttgttgcggagctggttgtggtttactaatagccttggctttctcgactgctggtttctccgcatcacgtttgacaactgttgctttgtcagacatcattgctttcacaatatctttgaccatttccaaagaaaagatctgcataatttcactctcgatcagtccttctacatccaagttaaatgaaatacaataaatttcttcctcacggtccaaagagtcttcattcacatcgccgggattttcccacaaatgcacttttggaggaagaatatcgactttttggttgatcatagtagccatggatgtcgaagctgaaccaatcatttgattcatcgcttcacccacggcacttaattcgacttcagtaaattcttctgaagctgactttccatcgccacccatcatcagatcagcaataaccgttgcatcactgacctctagcaacattaagttagttcctgctaaaccttcacgaaattcaacggtcgtagcaactttgggtgcatggatctggtcgagtaattcaccaaaatggatttttttaacacgtggtgtcgtaattgccacacgatgagtcagaattgatgacagagttgttgctgcctgtgacatggaaatattaccaacttcaccgatcaggtctttgaccccttggcgatctaacccctccaataattcttcatcatctgattgcgcagcttcttgagtatcactgccattcatcaaagcatctatttgttcttgtgttaaactctccgtcattcttcttccccctcgatcttgctcaataactcaattgcgaattgtccattctttttccctggtttgacccagtaaaacggtcggtcttcaatgtacgtatctaacggactggagattttagagtccagcttgatgacatcgcctggttctaatttcaagaaatcagccaagtccatttgggtgttgcccaaaacgacttccattggcagatctattgcgtttaacccgtgttttaattcgctttggtcatcttcacttaattcctggcttgagtcaaaccaattatgcaaactcaatttatctaggataccttcgaatgaaacataaggaatacacaagttaataaatgttgaaactccgaaaagctgtactgtgaaagtagctaatacaactggttcattaggtgataaggactgtagtaattgtggatttgtttctagagattcaagctcaacatcaagtgtcaggacttctttccaaactgattgcaaaattttagagaattcacccataacctcatccaataaagttaattcgatatctgtaaaaccatttttatccaaaggcggttgattttttcggttactctccaaatcagcaccaccacacaacaattcgactaaagtcatacatagttggggattgatttcgatcatgtgtgatcctttaaggggagctgctttaaacattccgatcaaagtcacacgtgggattgaatgaatgaattcgtcataactgatctgctcgatcgatgctaattgcatatccaagttagtccgcaagatatttgaaagaacattgccgctcatcttagcgaagtcttcaaaaatcatgtgtaaggtatttatatattctttagatagccgtgtcggccttctaaaatcgtatggcttcgcttgtgattcgtcattttgctcttcatcgatcacttcttcgtctaattcgcccgaatcataggcatttaaaagtgaatcgatttcctgctgtgataacacctgatccacaaagacacttcctctcgctcattagttcattccacaattaaaaaatcttatcattaacgtcgatcacatcagcaatcgtttgttcacccaagtctaccacaccggtaaaataaagggcggcttgatcttcacttagttgaatatcatcaggatcaacatccatcacttcgatcacttcatcgatcaataatccacgacgttcatcgtcttttttcattatcataatatttcggtttgtttgtgattccgccaatcctactaactgtgccaagctgatcaccgtcaacactgtgcctcgcaaatttatcaaacccttgacccaaagcggagcaagcgggactttggtaatttgaaccgtatcaacaacttcttctacagtttcggcagctatcaaataatgttgctgattcattttaaacaaaatcatctgcattaaaacacactccctttcttaattaaattcagtcaatagaactttaattaagacaatgccttatctaaggctttgatcacccgatcagtatcaaaaggtttgacgataaaatcgactgctccagctctgatagcatccatgaccattccttgttggcccatcgcactgcacattacaacttttgcactgctatcaaattccttgatcattttcacggcctggatcccatccacatccggcatggtaatatccattgttaccaagtccggtttctcagactgataaaggtcgaaggcttcttgcccattttgcgcttctccagcgacctcatagccgttcttttctaaaatatcctttaatttcattctcataaaaacagcgtcatcgacgatcaaaactttatttgccacgcgacattctcctctcaaactccaagtgattttatcattttgtcaattacacccaactctgggatgaagtatagtgaagcttccaagtaattagaatcataagtaaattcatttctgatcaccatgatctcatcaccaaactgttcaaattccatatatgcactactaatcacggcaccaaacatatcaaacgaacttaccggaacttctggttttaatttcttttccagcatcccgccgatcgatgttaaaaatgaacttgaaacaatgttagtcaattcactaactgcagaaaccttaatttcttcggtcacaccttgatctgttcccatcatcaaacttgagatctctttagcggccgggtccgtaataacaaatagcatcgcaccctttaagtcaccatggatgctgcttaaaacggtataaacttcctggtcatcggccataacttgctggtaaagctcgtcataacttaagatattgacttctggaacacgcatcctgatcacactgccaaccatttgtgatattgttgtagctgctttgccgccgccaatattcataacttcttttaacgcatctaattgtatgtttgaatatgccatcttaacccacctgtgcgtctttacagatcgtattgacgtccaagatcaatgcgatcgagccgttgccaaggatcgtcgcgccttggaatcttttgattttttgcaacatcggatcaatcttcttgattacgatttcttgctgtccgatcaattcatcaactacgatcccaaagtctttattatcacccttgatcaagatcatatatttctttccctgatccttttcagggatattcaaaatgttggcagtccggatcactggtgtcaatcctgtctgtaaaggatagacttcctgactagcagtttgtaaaatattatcttcatggatcatttcgacccgttcaacaacatctaacgggatagcaaatgtttcttcgcctagtttgaccatcagtgcctgaataatagacaaggtcaacggtaatttgataactgttttcgtacccacattgactttactgtcaacttccaatgaaccgcccagttcgttgattttagcttgaacagcatccaagccgaccccacgtcctgaaatgttagtgatctttttagccgttgaaaagccaggattaaagactaacatttgcagctctttatcactcataccggtcgtatcgattccacgctcttcagcggtaattttaaggacttgtggatcaaggcctttaccatcatcgctcaaagtgatcatgaccttatttccttcttgataagccgataattttatctttccttcttccggtttgccaagtttctttctgttttcagcatcctcgatcccatggtcggctgaatttctaactaaatggatcaagggctcactgagttcggtaaccacagttttatctaattcagtttcttcgccctcaatttcaagagtcatctttttatttaactggttggaaagatcgcgaaccatccgtggaaaacgactaaagacaacgctgacttgctgcatccgaattttcaaaaccaaatcctgcagttcagatgtcaagcgtgaaacctgttctaaagattcatgcacttcttctaaattttggcgactattggcatcttctagttgattgcgataaacgaccaactcagatacaacattcaaaaaggtatccaaccgagaaagatcaactctgatcgactgatttttggcatttttttgatgcgaagtgctcttcttagacggggcttttgctttcttaggttcaggagcagcgctttttttctcagtagtattttctttgtcaacagctggttgtgcgtctttttgtggttcttcagcggctgccttttgagttttctcatcgaattctgccgtcaaaacttcagcgatctcactactagattcaatgatcttcttaatgtcatcttgattactttcagttaggatcaacaatttgaaatctgtatcaaaattgccttcttccagctggtcaggagccggttcaatgtgaataatatctccttcactgtcgagcttatcgatgactaagaatgctcgtgggcctttcagcattgactctggatcgattcgaactgccgcactgatcacattaagatgttgtgttttagcctgttcgatcactgataagtcagcttcttctaaagtttcaaatttcagttcgagctgactatcttctggagctttcttctcatctacatttttatcagcggtttttgtttggccgccatctaattcattttcaactttatctaattcattccataattctgtgatctgatcttcgctttgttcttcttcatctcgcaagccgtctagaagttcggtcaatttatctaagcaccgaaaaatcagagaaatatgatcacttgttaccttcaacttgcctgatttgaaaagatcaaaaatatcttccattttatgagtcaacttgctcatgacagtatatcccatagttgctgacattccttttagggtatgtgcagctctaaaaatttcattgatcaaatcgatattgtctggttctttttcaagttctagaatattatcatttagttgtgttaaattatcttcgctttcttcgaaaaagatatcgcgataaacactattatcgtcagccatcaatgatccccccattcaaattatttacacctaagcacgaatggtctgtgcttattgttaaagtccgctaatgctcgacttttaaccggctcactccaccttgttttcttagtcaggttgcttgagacagaaagctccgcctatccaacattagttccacatcgcaaaatacgcaatctgaatctagtgtccgatagtgctcactttctcccgtctcactcaccttgtttctcatatataaacgactctattttctttaaccccagcttttctgcgctgttaagtgtttctgttgctcccgtgaacaatattccacctggtaccagcgcctcacttattttttgataaactcgatcgcgtgccatgggtttgaaataaatcgttacattgcgacaaattatcgcatgaaaacctgattcatactggtcagccaataaatcatgtttcttgaacgaaactcgttgtttgacggctggccctatttgatactggtctggtcctaatgacttaaaatatcgtctaacatcagtatcagaaatattttttaactcatttgtcgaatactgacctaaacgtgctttctttaaaatgtcatcatcaatatccgttgctagaacattgcccataagatgatttttttctaagatcatcgctaaggtgtatggttcggcgccggtcgaacaagccgcactccatagtttcaaattattaaattgtggagcaactttttctaacaaacatttttcaaaattactaaatatttcttgattgcggtaaaattcagtcacattaattgtcaaatgctcgataaactccgctcgtttgattggatctttgtccaaaaggtgttcatattcatgcaacgagttgaccccgtttttatccataatatttttgatcctgcgttgcatttgtctttctttataatcatcgagatggatatgatatttctgctccacccacctattaaaatcagtaaaattttcttccaacattttaatttcacccaacgatcgtctgtagtattttcccgatctcatgcaaacttacaacttcatcgacaacttgagcttcaattgcagatcttggcattccaaaaacggtacaagattcctgatcttcagctattacataaccgccttcatccatgattgtttgcaatcctgccgttccatcatgccccattccagtcaggataaaagctgttaaattagcaccataatgagcagccgccgtttcaaacaagtaatcaacggctggccttgtcccatgcatcttcggacgttgatctaacttgagccggtcaccttggatcgtcatgtgataattaccaggacacaagtagatctgatttttgaccagcatattatcactagcctcaacgactgtagcgccgctttcttcatttaaacgctcagaaaacgtgcgggtaaatcccgctggcatatgttgtacgataaaaacaggaatgtttgtatgactcacacctttaataatttctaatagtgcttttggtccacccgttgatgagccgatcacaacggcttggggcctgatgttacgctttttatgtgctccgttgggtttggctttatgattggcagcaactggcggtttactagaacgtccgcaaatatttttgatctttgcatacagttctctgacccactcgtcttgaatttccatcaggttcacaggtttttcgataaaatcggccgcaccatattctagagctttgatggttactgcctgatcactgactgcacttagcattatgaccgggatagaataatcctttttgatctgtctaagggcgctcaagccatccataacaggcatttcaatatccattaaaattaagtcaaaatcattatctgcatcaaggatgtccaaacaatttttaccgtttcgtgcaattcgaaccgttgaaacactgggcattttattcaatatatccgagatcactttgcgcataaatgcagagtcatcaaccatcaaaatcctattcataaggtataagaatcctttcacatctttacttttctctcttaaacaacattctcaagtcatcaatgagcaaattttcgttaattaaaaaacagtacatagtttttaaatgtatctattttcctgtctcacgaccctgatcaaggtcgaaaaatcgtttaaatcgacgaccatggtccttccgctgctgccgcccgtatcttggccaactaacgggatctgcaggcttgccaactgatttaaaacagcgtcaacatttctctgaccaatattagctgtcgtgaggttgtttttaaatccaaacatatttgcaccaccagagatcttagcttgaaatttagctcgtggtgctttttgcttaagttctttgaccatcaggggtaacgccgtattggcatacttagccaagttcaaacctgaagtcccgttcttttcaaacggtttactatcagggagcataatatgactcaatccaccgatttttgaaactggatcataaacgatcgttccaatacaagaacctagccccacggtcattattttattaggcgcgtatgaaattttataatcagagattcctaccctggtttcgttagtgttctgcagcatcatccgtattctcttctttttctgaattttcagtaatggaatctacggatgaaatgatctcctcttcttgtgaagagttgaaaagataatctaagttcaactcgatcactacttcatcgcccatcttcaaaaattgactgatatacgggcgcttcagtgatgatctgtccaaatctttttcataatccgtctcagtcagcgacatgatccctacgatctcctcgacaaagatccccatcgtccgttcgctccaatgtgccaagatcaccttagagtccagcgttgcaggcgataattcgccgtaaagccgcttactaagatcaacgattggcaacatctgttcttgatattcatacacacctaatacatagtctggcacttccggcaacgagataaacttttcagtttcgatcactcgtttacccatttcaactggcaaagcaaaaacttgcttatgacttttaaaaacaacatattgtcccatttttgtacccctctttaacttctacaactaagaattgacgctgctagttttttaatttgaaactgccgatttgcaaacgtctgatctcatcagcttgttgaagctgttcgacacttttttcgagttcttcgatcaaggaataaaaatcatccaagttagccgatacttcctgtgtacttgcagaagtttcagcgatctgtgaatccatttgctgaatagaattattgactgcatcttttttatctttgatctcatctgcatgtgaactaacatcggttaggccatcgctcaactgcgtgacatcctcggtgatttgttcgctagccttcagtacaccagaaatattcatctgctgttgctgactgcccttgtatgatgcatccagatcaacagtcattttcttagacttagcacggatcgattcgatcagttctctaatattagtggttgatttgccggattgttctgccagatcacggacttcctcagcaacgattgcaaagcctttacctgcctcgcctgcacgagccgcctctattgaagcattcaaagccaacaaattagtctgttctgaaatatcattgatcaactgcacgatattgccaatactttgaatatcttgattcatcgccgtcatttcagaaacaatcttcttttgactttctgtttcttggttccaagaccgtgaaacttggcgcatcatttccatgttttgaatattactttgctttgattcgtcagcatagctattcattttttcaattttctggcgtatctcttcaatttggtcaccaaaaacattcatttgagcaactgtactttgagaagctgttgcttgctgtccagcattagtagcaatagtccccatcgcttgacggacaccatcgatcgaacttttagcgtgcgtcgattttccacttagatcgttgaccattgtttccgactgctcagtttcttccttgatcccagttaataaagctgaaaatgcattggctaaaccaagcaactggtcacgagttttaataaacattgggctttggccgggaactttgccgatctcgtcgatctgactgaaatctccctctaccatcttaccgacctgaacagaaagtttttttaatccgccggcttctcctcctgttactgccgtatttttatgaccaaatagtacatacaagagatgcaaagcgactacaatgaccgcgagtatccaaaaccttctcatctccgctgtctgtgccgaacttaaaacaaaagcccgaaaaacaattaaaacaatgactgtccctaaaactggcaagaaagctacttcggagttagcttttttagccgtcttcttacgtttttccatttgttttccttccccatataaaagatttggtatctgtcataatactcacttaagcaaaacgacactccaatctattatatcggttaaaattttatttttttaaccgtttaccaaacatagacatcttttggatcagaaaatcttgaatatccaccgtctggatcatctcggatcagttctccattttttagttccaaagttcgatgacgcaaagaattaaccatggtactgtcatgtgttgctaaaatgatcgttgtccccatctgattcaggcgaaagaaaatttgcatgatctctttggccgacttaacgtctaaattagcagtaggttcgtccgcgataataactggcggatcattcaataacgcacgagcgatcgcaattttcttttgttgcccgactgaaagttcctgaggcaaccgctcaataaatagcatcatttcgacactggtcaatacctctgccatccgctcttcccacttttcagtggggatctctagcgctgacatacaggtttccatattttctttgatcgtcaatcgcggtaaaaaaaggtctttttgcgaaacgatccccaattgacggcgtagtttgtatatctgttcatttctcaaatattcaatttcaatattgccgatccgggctataccagaatcaatggagcgttgagcacttaagatctcaagtaaagttgttttcccagccccacttggaccaactacataaacaaattcaccttgttcgatcacgcatgaaatatttttatttgcccaaacattgccatatttttttgttacatttttaagttcgatcaattttttctcctaaatcagtcggtaaagtggttgatggtctccatcatttcatctgtagatgaagcagcgcgggcattcatttggtaagacctctgtgctgttaataattctgtcatttgagtagccagatctacattggaactttcaagagttccttgcatcacactactacctgccccagcggctctaaaaccgccattggctaaatacaagttatcaccaactgacaccaatgaatgtgcgttgtttggttcaaataaacgtaaagaccctaaaacctgatcaccggatctgatcgttccgtctgaagaaactttcaagtcccctgctggccaattttgttctggcacccgcgcgtcaactgcaacccgatagccgttgctggcgatcaaaccaccgttagcatcacgatgaaagtctcctgccttagtcaagtatgtattaccatcgggaccaatgatcccaaaaaaagcattgccgttaatagccatatcaagtgcacgaccggtcgtttcaaattttccgacttgatcatcgactcgtgctcccgcggcatttagaccagtattcgaatcaactcttgcattagaattaccaagtgcaccgtcgctattagttaaattattattcatcagctcattaaatgaattgatgattcccttatagcctactgtgttttcgttagcaatgttatgtgaaacattatccagattattttgcaagccgttcaaacctgttctgttaatggataaaatagaattcaagttcatttttacttactctcctcatttcctacatgatctgttttctcaagcctatactaagtaccatcaagactcactgtacgcctgagaaaaataaccaactatttgatctagatccgacctagttggttgactgccttatccaaggtcgaattagtagctgatagcactttttgttgagcctgaaattggcgcccggtttccattaatgagaccatctcatcagcagtagaaacattagaattttcaagcattccagcttggaccggcaaatcaatttgctgggctccctgcccggtataaagcgttccgccgacattttgaagttgtgcatttgctgggaaagacaccaccatcaaattttgttgtgcttgctgggcatcaactgggccgccatttcgacctatcacttgaaaaccttcttcagtgatcagctgaccggcatcattcactgaaaaatgaccatcacgcgtatacgcgatttgaccatttcccattctaacggcaaaaaagccattgccttgaactgcaaaatccgttgccaagcctgtcggttcaagcgagcctttttgcatgtccagagcactgccctgaatttgattgccccatgtaaaaccgccaatctcatggcgggtttcatttttgggaccagcctggttattatgtaactgtgcctcgttcattgttgcttcaaacaaatttttttgcaggtagccaggtgtcttgatattagcgatgttaccgctaatattttcttgttgagcttgcaaaacattaaaactatgtcttaaagtatcaattcctctaatcatcattttcctccataaatccttttagttttccaactgcacgcccatggatctgtgaaacgcgtgcaatagaaacgtctaagaccaaactaatttctttaagtgtcatttcctgttcgtaatacaaactcaaaactaattgttctctttcagaaagcttgctgatcgccgctgccaactcctgtttcatttctgtttccaacaaatgtgcttgtgcatcgcccgtttttttatcacgaaagatctcttgtctgctaggcgattgttctgctgaaaacaagacatcctccaaagagatactagccatataatgcaagctatcataaatatcgttcagctttttctgattgatttggagcttactgcataattctttgtcagtagcttctcgtttcaattcttgctctaattcctgcttagcccgataatagcgagtcaaattgtcaaatttataacgagacaaccgaccgtgactgcggatctcatcaatgatggtcccacggatccgtacataagcataactttcaaatggtactttcttttgtggatcaaatttcttaagtgcatcgatcaagccgatcactccagtattgaagagatcttcgtagtcataatcggagcttttaacagtgatccgagcgatgaccttttcaactaaaggcaaatatttgataacttgatcttccatattcatctcatacaagaaaaaagctcctttctgaaaataccgggtgaagtaattgtcttctatccttgttcttgcaaatatgtgttgcaaattggaatgtgacgcttactttggcatagtttgtctcacaaatcagaatgtaacgcgtactctggcatagtttgtgtcacaaatcagaatgcaacgcatactctggcatagtttgtgtcataaatcataatgcaacgcatactctggcatagtttgtgtcacaaatcataatgcaacgcatactttggcgtagtttgtgtcgcaaatcgaaatgtgacgctttctctggcatagtttgtgccacaagtcagaatgtgatgcatactctggctatgtttttctcacaagtcagaatgtgatgcatactctggccagctatcttcaacacgccttcccacagagtgccttcctaaaattgcaactgcccgactgcctcgatcccgatttcatttgggatctcatttaacgacaaaattgccaaatctgggaagttaaacgacaacaactttctaaacgcagttctagtctgtggatttgtcaaaaggacaaaggaaatattttccaccagcattttttgattcagctgagtgatcgcatccaacatcttattgaccgtatccggctgcaaaacaggatacgaaccagttgctgtttttttaatactctgtgcaaccatttcttcaattttgggatgcacagtaacggcataaattttgttatcttcaccgacatacttgttggcaattgttcttcttaatgcttggcgaacgtattctgtcagcgtttcggtatctttggtgacggtcccataatctgccagagtttctaagatagttgataaatcattgatcggtaccttttcttccaacaaattctggaggaccttttcaacttctcctaagcgtaaaatatctgggatcaattcatcgatcacaacgttgctttgttgcttaatgccttccaataattgcttaacttcttggcgtcccaaaagttcaggagcatgtgagtaaataacttccttcaaatgagtggcgataacagtcaaaggttcgataactgtgaatccttgcaggtcagccgcttctttatcactttcattgatccacatcgcttctaaatgaaaggctggttccacggcttggatgccattaaacgggatctcatccccagtcggactaaagatcatgtatttatcaggataaatatcacccgtgccgacctcattgcccttgatcttgatagaataattatttgcatccaggtacaagttatctcggatcctcactggactgaccaagatccctaattcatgagcagtttgtttacgtaaagcaatgatccggctcatcaaactattgtcgatcgaactatcgaccagcggtatcagtgcataaccaatttcgatcgctaaagtttcgacttggaaatcggctacatcttcgtcttcttggacatcttttttcttttgtaaagccaaagtctgttttcgttgttgctcttccttaactttcttagcatcctgttgtttgatcaggaagctaacaccaagtagggctaaccccataaccataaagggaataaacggaaaaccggggacaagggataaaaccattaagatccccgctacgatccggaatatttgcggattgcgcaacgcatcttcagcaatatctttaccaaacgtactatcattatcagagcgagtaacaataatacctgaggcaattgagatcaatagtgaagggatcgaactgaccaagccatcaccgatcgacagcttgccaaactgtgataaagcttccattgcgctgagatcacctttcatagtaaagatgattgttccaccaatcagattgactaaaacaatgacgatccccgcaatggcatcacctttaacgaacttgctggcaccatccatcgaaccataaaaatctgcttcacgttgcaggtcttcccgtcgttttctagcctgcttttcatcgatcaaacccgagttcagatccgaatcgatcgccatctgtttccctggcatagcatccaaggtgaaacgggccgacacttctgaaacacggccggaaccgttagtcacaacgaccaactgcacgatcatgatgatcacgaacaagatgatcccaacaatatagtttttccctgccataacgtcagcaaaggcggcaataacatgtcccccatcaccttgtgttaggatcgcacgagtcgatgacatgtttaaacctaacttgaacatcgttgtgatcaaaagtaaggttggaaaagtagtaaattccaagactgagtgagtaaacatggtgatcaataatatgttcatggcgatcgccatgttgatggtgatcaaaaaatccaagactggcagcggaagcggaatgatgatcaaaccaatgatactgaccaccaaaagtgaaacgatcaggtcagctggtctgagtgcattcttcttagctgctttttgcttgtttttcatcagttactctctctcctatcaactcaaatccggttcaactttaaccagacttatattttatacttagcttcttcatccaaccggtagaccaaagcgatcaaatcagcgactggctcaaaaaactcttccggaatgaattctcctgcctcgatcttgagataaattgctcgtgccagcggtttattctcaatgatcggtacatcattttttctggcttcttctttcattttcatggcgacctcatcagctcctttagcaagcagctgtgggactggtgtttctgtcttatcatacttgattgccaacgctaaatgagtcgggttcgccaaaacgactgtcgcatctttaacttgggcgatcgagttccggaccatcgcctgatacttagctttccgctgcgctttgaccttcggatcgccttccatttgtttcatttcttctttgatctcttgtttagtcatcttcaatttcttagtccgactgaaactttgataggcaaaatctgccaaccccaaaaccaacaaaaccaaggcaatctgcatccctagttctttacaaaaattgagaataaaaaacaagatcttggcaggaccaacagaaccagcatttaaaatgtcacgtaacgtagatatgtatttgcgataacacagatatgcgatcagtaagaactttgccagcgtttttcccaggttgactatcgcatccagactaaacatccttttgaaaccacttaaagggttcaaacgtttgaaatcaggctttaatggtttagccgtaaataaaaaaccaatttgcacaaaattccccaaaaaactgatcaaataaccgacgaccaagaatggtgctgccacgattaaaaccgttaagatcgcctgcaagccaaccttaggtaggtctgcgtataagacctggtagttatccaactgctcgataaagcctgtcatataaggaaaaaacttgcctaatccaaattgccaagcaggaataaagataaacgaaaaggtcaataaagccaaagcagctgttaagtctggacttctagcaacatttcccttcttgcgcgcatctcttttacgcttaggggtcggtttttcagttttaccatctttatccatgaaataacctttcctttatcagactatgcctgacctaccgaacgcaggaactcgactagatactcatatgactgtgggattatctttcccaacaattccacgacatttggcagcatgatcaaaaagatgatcattcctacagtagatttaagagacaaacttaacatcagcacgttcatttgcggcacagaccgtgacaagatccccaatacaatatcgatcaccatcacagcaatgatcaaaggtgcagcaacattaaaagccatggcaagggtcttactagtcaaaatgaccacacccttaacacttgcattcgtcaaagtggcggttcctaaaggaacaatcgtaaaagatagcatcacagcgcgaaacaattccagatgcaaatttaacatgaagaaaactgccagtgccaaccagtagtacatccgaccaaattgtgaactggaaacttccattgtcctgtcataagcctggcccatcgaaaaaccattttgaaaatcgatcagggaacccgccatgatcacagcttgaaaaaccagttgactaacatagcccatggcaagccccaataaagtctcctttaaagccgccaaagcgaagataaccacactcatcgccttgaccttgccaactaaaggaatggcagcaactaccaaactccccccaacgatcagcttagcagtattaggaaaacttctttgtgataaaatcggcgctgtgaccataaaagaaaatatccggcaaatcaccaaactaactaattgtacttcggccactgacgtcacacccccgagatcaagcggaagatatattccgtgaattcttttagcgttgtgatcataaagtttccagccaagatcagggtcacaaaaattgcgaccaacttagggacaaaactcaaagtttgttcttgaatctgggtcgtagcttgaaagatactaatgaccaaaccaacgaccatcgcaactatcacgattggacctgaaactactaagattctgatcaccgcttcacgcatgaccgtcaagactaatgaaatagacattaagctccccctctaactgaaactatgaaccaacgattcgactaacaagtaccagccatctaccatcacgaataataataatttaaacggcaatgagatcataaccggcgacagcatgatcatccccatcgccatcagcacactcgagacgaccatatctatgatcaaaaacgggataaatatcaaaaagccaatactaaaggctgtccgcagctcactaataataaaagccggagtaagtgtcgttagcggaactgactccacatttttatagcgatgcttgtctttagaaacatctaagaacaatttgacatctttttttcgagtttcttttcccataaattccttaagcctgacctctgaacggttgaatgcttgtttttcagtgatctcctgccgactataaggttggatcgcttctttatagatatctgtataaacaggcttcatcgtaaacagggtcaaaaacaaagccaagccaagcaaaacttgatttggtgggttttgctgcgttcctaaggcacttctagtaaatgaaaggaccatgatgatccgtgtaaaagatgtcatcatgactaacaacagcgggaccacggataaaatcgtcatcatcacaaacacattaacgatctgcgacgaatttccgctctgtccactattgatcaaatcagtaatgccacgagaaacatcatcgaggccagctgcatgcactgaaactggtcggaacaagcaagccgttaaggacaacccgctcagtattttactttgctttttcgtagtcattacttctttctcttattctgcagcttgatcgtcttttgcttgagaatggccgcaaaatctattttttcactcgcttgatcatctgaactggtaaataattgctcaacctcttcttttgataactcagagatcaccgtactgccttgttctgccaagctcatcaagtaatagcgctcgatgacttgcacgatcccaagtgcggaagtttttgaaactgggattttcttgataactcgaaattgccgatcctgtggagcaacgaatttctgtaagtattttaaaaataagttgatcaaaacgatcacgataattaatccaaccaccattttgatcaacgacaacgttaactccatttgaatactcctcgtatgatttaacttattggatcacaaaatctgtcacataaacttcttgcactattgaactgccataatttttattaatagcctctttgacttgttctttgacctcatcgatactttgattatttttcaataaatctgcggccctttttggtttcaaaacacggatcatgctgtcacgcactaaaggcatgtctttttttaatgcttttgcttgatcatcgtcagccactaacaaagagacctttaagcgtaaatattgtggatcagctgcatcatccgttgccaaattaacaataaactttttgacgtttaccagacgctgtcttttagaaatggcagctcctgtttgcactttttcagctttaggttttgcgtcttgactattaaagtacttgtcggaaatgatcgtgccggcagcactagccccaaatgctaaaacgactactaaaacaataagcaatccccatttgatgccacctgctttagtttcagttgtttctacttcttcattcttcttcattgtttccctcgttattcccttcaaaaagattctcaccagaaaaaattcggtgacgatattctatgatcgcttccctaatttcaaacgctgtgtctctaactaccagcgttttcccatcgacaagcgtgattactgtatctggggtttcatcaattcgatagatcaaatctgggttcaaataaaattcttttcctttaaatgaagttaacaaaatcatgaacctgccccctattatttatcctgtacataaaataaaaattttaccttacaggttctttttccccttttgatcaaattgctgcgctcactattctaggacagctcctcaagccaggactttccgtctaaccaacttccacacacaatgctaaaaaacgcattatggcctagaagtccgttagtactcgagtcctacccggcttacctcgctcactatcttaggacagctcctcaacgcaggagtctgcgcctatctagtttaaacatcacggtgccaaaaacgcaccatgatgtctaaacccgatattgctcgtctcctaaccgcgttgtttcgctcactattctaggacagtttctcaacgcaggaatctgcgcctatccagtttaaacatcacggtgccaaaaacgcaccatgatgtctaaacccgatattgctcgtctcctaaccgcgttgtttcgctcactatctctttaggttgatcaattcttgcaacatctcgtctgacgttgtgatactccttgcattggcctgatatgctctgcttgtaacgatcatgtcagagaattcttgcgctaagtcaacgttagaatcttccaatgtccccgctaataaagtgttggtcccatctgtaccaggtactaaattattggcattaccagaatcctgtgatatttcataagtgctgttaccgatcttgcttaagccggctggattactgaacgtagcaatcgacactgtaccgatcacttcatcttccgcgccataacgcgcagtaactttgccatcaggaccgattgaaacgtgaccttcaactaacttttcaccagctgcattttgagctggtactgtaattcgagttaacgctccgccttcctgtccgggagcatagcccatcacacgtaaaccatcagcattagtcaagttgccattagcatcgatcttcaaagcaccgttacgtgaataaacctgaccattattaccatctcgctcaaatactaaaaacccgctaccattgatatataagtccaaagcacggccagtcgtgttttgaataccttgacccatgtctgtatcgatcgcaccgacctgaaccccaagtccaacttgcttaccatcaataccgccaacggttgcacgtggtcctgaagcattcgcagttgtctgacttaaaatatctgaaaagttagcacggcttgacttgaagccgatcgtgttcgcattagcaatgttgttggaaataacatccaacctggtttgttgactcttcattcctgaaacacctgaatacaatgaacgtaacatttaaaattcctcctatttgtgtagcatctttttaaattttgctattttttaatcttttggttctctaacttctttgatggcacccatttcatattccgtaccgttgacggtcagcttggcaataccgccagtaaagttgactttatcaactcttccttgcttttcattgccttgttcatcaacaactgtgacatccttgcccattaaattgaaagcttgttgttgctgccctaaaagcaaagaattattcatcattgtcgacatattatttaattcctgtaaggtagcaaattgtgccatttgtgaaatatgatctgtaccactgctattggaatctccatctccggtcatggaagggttagacattgatgtcgctaagatcttcaaaaaatcatccattgaaagtcccaaagcatttttagcagcaccgttttgtgaagtactttttgttatctcactcgaactgccaagactgtttgcttgtacaccgcttaaattgtccatgaaatatattcctcctttgatcacgcatactctgagacgctcaaaccaacaaactgatcgttccgtgcttgatttgttcttcgcctggcaaatgttcttcactgaccacttgtgtcctcgtcttgtgcgaacgtgcaaatcggcgttgctgttcttgctcattttgcatgaaatcaccagctggaccatctcgctgctcgcctaaaagttcagaagtttccgccgtttgtctcacagtttcaacttgtttcaatgttttagtcgttggatcaagctgcagctgctccatgatctgctctaatttatgtgtgattttttgtaacatatcacgtgcagtactattttgaacttcaaattctaggctgactgcctgttcattcgtctttaccgcaactttcatctcacccagattagccggtttcaaattaaaaactatgctctgggtattgcccttactggataacaagcttttctcaactactggagtaagtgctttttgcaaatttctcacgacctgctcgaccggtctagttatcgttgttactttttgccccacattagcttgcgtaactgtcgcgcttttttgttcaactacgcttaccatacacgttctatctgtaagctcactaaaatctatgatttcagctgcttgtttttgtcctgctagcgaagctttcgtaccgatcaagatttttgaactaactgataaaatttccgctgactgttttagcgacgatactgaaagctcgtctgccatcgctgcaacttcaggtgatgttttaatttcttgtttacccagctgccctgctttagaaactaacgggctctcaatgatctttgtaggttgaaccgactcaacttccagatcagtctgctgagcagcttcctgcttgatctttgtgtccgaactcacaaccagatttattgtcgagttagattcttgaatagcctggctttcaccagctgacttagaagttaccatactaacaaagtttgctatctgttccttcaaggtcgcttgctgggttgcagacatttcatccaagtcaattacgctttgtgccggattttcgccaaattgctcggtttgttgtggtgcaacgtcattgtctgcaataatttcggctatcggtcctgccttggcttgctttaagtctagtggaggagcagcatccttaggtaatttttcattttttccggcgttatcattttcttggagcggttcgactgcttctgattggtcatgctcgatctctagtaaaatattttgctttttcaaatgatcgctactgctaactaattccttgagtccttccagcaaatcaggcgatatttggacttttccttgcttgaccaagtcatccaaagaaactgtaccgtttactaactgttggaacgttttcgagtcaatttgcaagacttgctctagctctttttttgtttgcgaatcagtagttttaatatgtatgttaagcatgtctttagaagtctctagtcgatttttagcctttttttgtctgaaacctttatcatcattaaccgcaatttccggcttatcttgtgctaaaaaagcctgaaatttccccgtttgttttttggttggcttggctttagcaacctgcaaaccagcaattttcttacctgtaactaccttttgcatttcattgtcctcctttcaaacccttgctttaacgtcaaggtcaagcgatatttacattttgttgtggccggtgaaaatcatccaactgcttttgttcctcatgggctagctccttttgatattgtgcaagctgctttgttttaagccgctctaatattttccgttgtttctgtgcttcgatcaattcactgcgaatttgctctttttgtgcttgcaaccccaacagttgatcgtgacaaatcatgatctggtcgttaagagcttgaatatagcgtcgtgtgacttgcattctgctaactgaaaattgtggagtttccatcatgctgtctttttcttgcatgacttgatccaattcagtatttttctcgttttccaggcggttgacttcagcaaaatgccccttgacctggtcttcaacttgcaaacgatattccagcactttttgtaatgaaaaattaaattcttccatccctgatctccctacccttctgcagtgatccgaccgtcacctaaaacattattcgaagcaaacaactgctgcaatctctcctctgtatctgtgaaacttgaaaattcatccacggcttgttgcaaaaagtcatcgatcggtttgtgcagctgcacagcatagtcgatcacaggatttgttccgctcttatatgccccgatatctatcaaatctttcgcatcagcgtatgttttcaaattttcacgcaattcactggcatggatattatgttcttgagagaccaacgatttcatcaaacgactgacactaggttgaacatcaactgccggataatgattttgggccgcaatttctcgcgataaaataatgtgcccgtctaagatcccgcgaactgcatcagcaatcggttcgttcatgtcgtcaccttcgaccaagaccgtataaaatgctgtgatcgaacccttgtcagacattccgcttctttccatcaacttgggtaattcggcaaaaaccgaaggagtataaccccgggtagttggcggttccccagttgatagaccaatttcacgttgagccatcgcaaaacgtgtgaccgaatccatcatcaaaacaacttttttgccctgatcacgaaaatactcagcaattgccgtggccgtatatgcacctttcagccgaactaagggcggcatatcagaagtagcacacactacgatcgacttagcataaccttcacccaagtctttttcgataaattctctcacctcacggccacgttcaccgatcaaaccgatcacgatcacatcggcctgacaatacttagcgatcatccccagcaaagtacttttaccgaccccactgccggcaaagatcccgactcgctgtccctcgccaaccgttaataatccatcgattgctcgaataccagtcggcatgattttttcaatgtcttgccgtttaaatggatctggggcttcctgcatcgctggatacccgaccatttcagactggtcaagcttggaacctttcaatggacgtcctaggccatcgaaagtatgtcccagcatttttggcccaaccttgacttcaagtgtcttgccagttgcagccactaggcaacccggcgcgatcccctctagctcatctaatggcatcaataagaccgtttgtttaacgaatccaacaacctccgtcactgtcttttttcccgcttttttcgcatagacctcacagacttcaccgacgaaggcttgcaaaccttcgactttgatcacaagaccaacaacttcgctgactttgccgtataccgaataaaaaggatattttttcgcttggtttaaataatttttaaaggggatctttatctttgtcatttatttacctcataattgttccagaaaaccttgtaattcctttttaatgtcaatatcaactaccgattcgtttgattcgacacgcagctgcaaagcatttaaactatcatcatcaaaaattatgtaacgcagatcaggaatttcttctttgacctgctctaacttagtggtcagtgattcatgataagcggagttagcccagaccatcaatacttcatttggtttttcgagttcgaataataatggactcaaaattgcagtgatcttttctggcgttagttccaactgcgtcttcaaaataatttcggccaactgtactgcaaaagaagtgatctcatcctgtttttctgccaggtactgttttgactctgccagactttgctccacgttatcttgtgcctgcttgactagaggtgccattttttgttgtccttttgtcacagcctcctggtatccatctttttttccctgagcataaccagaatcataggcttcttgcttgatttctgctgccttttgttttgcatctactaacatctcagctttcagctgttttagcttttgctggtaagctgccgtctgatgtgctaatttagcgtcaagagctgttaactgtggatcttgcttttttatttgaggaacaaaatctgctgtctttataccaactttcttaccatgcaggggcattgcctgctgtttcaaaatattattagacaatgctgtcttgacctcctcgaccaatatagatctcgcctctttcgtctaacttccgaataactgcgacaactttttgttgtgcttcttcgacagctgataatctagttggacccataaattcaagatcttctttgatattttcaaccgcatgttgtgacatattaccgaagataaagtctttgatacgatcatcgctgcctttcaaggccagctctaatacatcgtttgtcacatcacgtaatactttttgcacatccaacgcttgcaaagtagtaatatcttcgaaagtaaataggttggcctgaacttcactggccaattctggctgtctgctttccagaccggccaagatcgtcttttcagtactgcggcccgttgaattcaagatatcgaccaatgcgccgacaccaccgatactctcacgttcaccatcaaccacattggaaaacttatcttccataactttttcgatccgctgaatcgtttctggtgaagtggccgaaatcgttgccactcgttcagctacatcagattgcaattcatctggaaattctgacaaaacactggcagccttctcagcctgcatataacacaatatcaaagcaatagtttgtggatgttcttctactagcaaattaactaattgctgctcattagcacgacgggcaatgttaaacggttgttcccgcaactggatcgtgttcaaaacatccagaacttctttggctcgttgcggccctaacgaattaactaaaagatcctttgcgtagtcgatcccaccatccaaaacatattgtctggctgtggcagtgtcgacaaattcatcgatgacagcattcttttcttctggagtcacataatctgtattagctatttcataactgactttttgaatcatactgtcaggtaaaagtttcattacctgggaggacgcttctgaccctaaagagatcattaagatcgccgctttttttactccactcaattgagccatctcttatttcccctcctagtgatgatctttcatccaagctttcagcaattcagctgtaactgctggattagtctgggcataatctttagcctgtttatccttagcttgtctttctttgacttctggtttttcctgcagaggtactgctttttcctcttgttttgcttccggtaacggctcactattcgctgaagaagtaggtccaggttgtggtgaatcatcagttacatcgacatcataatcatcatcgtagtagtcatcatcgtcatcttggcgtttcttgcgaatgatcaaaaaggctgcgataccagcgattgcgatgacaccgatcggaagggcgatgtaccaccacggcacattattcttcaccgtcttagtcttatgaacttttggtgtcgtgtctggaacatctaaagcttgaacagtaactttatcaccacgatccttatcgtaaccgatggctgaacgcacaatacttttgatctgcgcctgctggtccccactaacatctccacgaatagcaacagaggtcgttaatctcttcacagttcccggtgcgctaacttgcttagtcacatcagtatctaattcattattgatcgtccggctatatgaagcgccattatcggtattatcgccagttacgttagagacattatcatcggtttgaccagtctgtgcttgttggatctgttcttggttcccattagcttgaacattttcactccgtaaatttggattgctatatttcgtagtcttgcgttccagtgcgtcaaaattaaggtcagcgttaactgcgacgctgattttgtttccatcagctaatgggcccaaaacacgtgtgatcttcttttcaagttgtttttcaaactgtttttggatctgcatatatttactgttcgcacctgtcagatcatcattgtcattattcccatcagccaatacatttccattactatcaacaactttaacgttttcggctgttaatcccttaacggcacctgtggtcaactcaacgatccctttaactgctgaatttgagatcgtgttgccattcaacgtcaatgcaaccgatgctttggctttttttcctttggcatcatcactaaagacatcatcatcaggcatcgttaacattactttagcttttttgacagcatttaaagaaccgatcgaacgttccagctcaccagtcgttgcccgctgatacatgatcttacggtcttcatcagtggtcatcatgctggtatcatcaaataactcatagccttgtgaactatcgggcagtttgttatcgacggccatatcgatccgatactggtcgacttttgtcttatcagctaagatcgttttaccatcatcttttaacttgtacttgatgtcttgatcttccaaatctttcgtaaccgtcccagcgtctgcgtcacttaaattcgaaaacaaaacggcatactcaactctggtgttcagataatatacgatcccaccagcagcaagtatgctgatcaaaccagctatgatagcaatttttactaaacgatttagattagaccatttgtcttttaagtttccaaaaaagtcctttactttatccacttccaagcccccactacacgactaaaactgcatgttcttaagatcgttataagcttccaaagctttattacgaacttgaactgcagtctgtaaagttaattgactttcagtcatattgatcatgacctgccctaagtcatcttgttttccactgatcatatcggtagtcgactgatccataactttcatgcttgaatttaaaccggataaagcatgatccaaataatcaccgaatgttttaccggcgcctttaactgtctgatcagaattatcgagtccagtaactttgcgcagttgagtagcataattatttaagccgttaataccattgacctgtgccattttatctctcctaattttctgatatttctagtgccttactcaagatctgcttattgacctgactcgaagcaacatttgcttcgtaagatctttgcgattggatcaagtcgatcatctcatccgccaagttaacattcggtaaatgaacataaccattttggtcggcatcggggtcatctggtttataactcaacttctcagtttgatcctgtgcaatgccagtcactcttacaccggaactctgtcgtttgttggcttccatgatatttccattgtctgcttcgacttgacgtaaattttcagcgaattgaactgacttccggcggtacgggccaccttccggcgttcgtgttgtattgacgtttgcaatattagttgatgtcgtatcaagctttaaccgctctaaggctaagccgctggcattgatctgcaatccattaaaaatactcactctgatctcctcttctccaatttagtcttaccattaatgattcaaaacataactcatcatttggtaacgccctttgagttgtgatgtcaacgcgctataattcaaaccattttgtgcctgatttaacatctcaacatctaaatcaacgttattgccattttctttaacagccgtatcattgcgcacgctttcatgcggttcaattgccccgcctgcttgcatatgcattttagatgtagtttttaggtgtgtttcttggtccaaagcattattcaaaacactttcaaactcgattcgtttagctttgaaacccggcgtattgacattagcaatattatttgcgttcaattgtgctctattagaagaaacgtttaaagcttctttcattaagccatatgtattttccaaaattaattacacctattttctttgatttaacactaatattttcaaactttttatatttcaattttcatagtagttgcttgcagccaagatgtcccctttatcaaactttttctatatttttcacagcattataattttagctgttaacatactcacaatcaagttaatttttaagttattttcaattatgttcccaatcgtcagtaaagcctttaaaccggagttctggttgctttttttgctctttcatttaatcagactcctttttcgttgatacgagctgtgcttccatttctgcaaattctttttctaattttgcaatttctaaatcaatggctgcaatttcttttttgacttcatcaatgtcgattggttcttcttcttcaaaagtgtctacataacgcggtatattaaggttaaaatcgttttccttgatttcgtctaaagttgcaacatgggcgtatttatcgacatcttccctactcttgtatgcagcgacaatcttatcaacatcgctatctcgcaagttattttgattcttagctttctcgaagtcactacttgcatcaatgaatagaacgtctttcacttggcggtttttcttaaaaacaagaattgtggttggaatacttgtgccataaaataggttagctggtaggccaatgacggcatctaaataattcttttcaatcaatgtttgccgaatcttcccttcagcggcaccccggaataacacaccgtgtggtaatacaatcgccattgtcccttcattatttaaatggtagagactatgcaacacaaatgcaaaatcggctttggaagctggtgctagtttgccatattcgctaaaacgggggtcttttagtttcgtttcattattatcccattttgctgaatatggtgggttagcaaccactgcgtcaaaactccgtggttgatcgacacctgcttcatccggtccatctggccaatcactttcgagtgtatcagcattgtttaaagtcatattattaaatgacacatcatgcatcattaaattcatacgcgccaagttgtaggtcgttgtatttaattcctgaccatagaacttaattgctccggagcggatagcttcaggcaattgattgcgaacggttagtaacaatgagccagatcccatagttggatcatatactgagaaggcagtgttgctaggtgcgacatccatcgtgactaatttagcaagaatcttgctgacttggtgtggtgtatagaattcgccaccctttttcccggcactggccgcgaattgtccaattaagtattcataaatttcacctagaatatctttatcttcatcactcttatattcgatatcatcaactaatttgacaatattattcaaggatttagcacgtgccgtcgttgaactacctaagcgcgaatcaccgagattaatgtcgttaaagaccccgttgaaatcttgagcagcctcttgatttaagaccgcatttttattgaaattatcaaaaatcgtttgataatcacttggaataaccgtgctattttcaattcgttcatttaatgattgccacgtattagctggcgcaatcgcataacctaaacttgacgaaatatcttcaagataatcagctaattcatctgccgttgcttgttcgacataagcttgattaattgtctgcccatcggcaacatcaatcacattattagaaactaaatattgttcctgatgttctgaaaggtaccgataaaacataaaggctaagatataattcttaaattcaccagcgtccatatttccccggagttcattggccattgcccataatttcttagtgatgtcttgtaatgttgttatctcactcattagattcgttctcctttaattgcggatcttttaatgtattacatgtttatcagctgctaaataaattgcttcgcgtaatccgtttcggtacctgattttcgaaagtgcttggatatcagtatctaatgctaaattcttataactcaaacttgcttcagcaataatatctcgcaattggccagcatcatctaaatcttgttggccatattgatgcgtactaaatagttgtcgtaacccagcacttgtaatcacatctgtgatcccccactggtttcgaaattctaataaaatccgatcaatactaatctgattagcttcttgaataacttgctcactatcgtccaacttgacaggatatatcattgccatccctttaggtggatagtagccatcaaggatcgcttgtgtcgcgtttttaattttgtgcgcataattttggtcttctaagccatttgcaaattgatcaatatccttcttcgtcttctgagcagcctcaattttttcttcatgcatttcattcaagagtttttcaacgagttccgtcaagtaatcgtagttgacttgaacatctttgatgtgcgtcatctttaactcaatttgctgaacaggcactttatcccgcacactaatgtattgttttatttcattcgttaaaacagtggtcaattccttttcttgtgccggtgtcatccctaaagcgcgaattaaatcgtccggcgtatcatagttaaatccactatcttcttcaccatcttgcggtgtatattgtttaagtttcgacataccgacgttgtattgtcgcaataattcaaacatctcgtctttttggcgttcacttggtggtaattgattaaaaccatccgttaaatcatccagttggccgacaatcccacgaacctcttggaccatatttttaaagtctttcgctaaaactccagaatcgacgttttccttttgctgttctttttctgataaagtggctgaatccttgttggaataaatggctaatgctttattcattaatttttcattctggctcggccaccgataattaaccactcggccccaaggtttttctttcatatcagcgattcgatttgttcgagagtacgcttgaattagacctgccccttttaaagtacgatcaacatacaaggtattcatttctggcgcatcaaatccggttagtaattgatccacgacaatcactaaatctaggtagttcttgtcagttgcagttcgattaaggcgactcgtaacatcttgcgtatagccagaaacgtcatctaacccaaaacttgttccaaattgattgttataacacttcatcgcattgtgcaaattctgattggtttcgaccatgccatctttattcgttgtattttgactaaatgtaattgcaactttcagcagttggccgccgttctttgcatgctcttcattgacccgttgaaattctttaaagtacatcatggccattggcgtacttgctttaccaccaccaacatgggttgtaaatagtgcattgtactttccttcattagaacgattacgccaattcttaaaaatatcctgaacgactaagtgaacatgatcttcattttcatcatagaaactaggtgcaatttcgtcatccatatcttcttgtgataaattatcaattttatcttgaaccttttgctgttcccaatctggatgttgctttttataaaagtccggtaagtattgtgttttcatactttccgtatcaattgttgtctcaaaatcaactttaaaccctaatacatttcgatcagcaatggcttctttaatcgtgtaagcatgtaataattcgccaaaaatatcttcagttcgtaaaccgttagttgtttcatcaaacattggtgtgcctgtataaccaacccatgcagattttttaaagctcttttgcaatagttcaaaagcatccccaccagttgaccggtgtgcttcatcgacaataaagacaatgtgtttatcaggtgacttaaaactcttacgcttaaccagtgtttctagtttttggactgaggtaacaatgatattgttatccttgctctttaatttccggcttaagtcgttggtactctgtgtcccttgcacactgccagagcgactatcatcagccactgcaccatcaggatcatacgctttgtaattttcattcgtttgctttgttaaagcaattcggtcaacaacgaaaacaactttatcgactcccggcattcggctagcaagccatgctgttttaaaactggtgattgtcttacccgaacccgttgtatgccagatatagccaattttgtttagtcccatatcaaaatcaactttttttattttttgaatgacattttgtgttgcgtaaacttgataagggcgcatcactttaatcatttgtttattcttagtaccatccaaaatcataaagttagtcgccatttgatgggccattgggatacttagcattgaatctgcaaattcgcgccaattacggacaatcttgttgtctgattttcgttgccaattaaacgcgaaatctttgttaaatttatctgccgttgtattggccatatatttaacattattcggcgtaattgccaccagaatctgtaatgttgaaaaaatgtcagtgtattgattttctaaaatatattgatgcatctgattaagtgcttcattaacatcatgtgaatctcgtttctcttcaatttgaataattggtaagccattgattaataatgttgtgtcaaaccgccgttcttgcttcccagttagtaatgctggtcgttcaatttgattgacgacttgatagactgtattaccagcgccaatttgtttctgatcaaaaacggttaaaaacacatgccgaccatcatctaaatcaatttcaatctgagagacaccatttaacccatataaaaattgaccagcatcatacggtgtttttaaatctgaaatgattttcttcacctgattaaattccatgacacttagcggattatcgagtgtattttgattatgctgctctaaaatctgcttaaaattagcccatagttgttcagttgttctaatatcgtctcgatactgccacagcttagtcttcacaacataatcttttgctgtttcacgaatattacttttttgaaaatcatcctcagaaactgttattgtcccacttgtaatatatttaattaattctgattcgaaatttaattcgttcattcactagtcctttcgcaactgattcattgctatttttagttttaaatccgcactttgctttctaaaccagtttaatcgtatttggttgaaatacattcttccaattaatcgttgctcatctattggtggtagtttattaattctcaacgcttttagctgtgcaagtgtatatttaataaccatcgttccttgtaatgaacttacaagctgtcttttaatattgtgatcctgattcaacaagaaaactaaatagtgagtatccaaatcctgattagggattaatttaataaaattttgagtttgtagatagccaacatgcttttttccaacaacacttgcttctccagaaactaaattaaaaataatatcgccttctgataaaatcataactttatcaggggtccgaatttgacgtccctcattggacgatgtttctgactgaactaaatcagctttcaattcagattgcccataaatacaataactgggatcactttcattcattgaaacaaatagacgagattgtggagagccactcacaaattcaacaaacttactaagtttctccattaaatcctccttcaacacttatttaatatgcttagtatacgtcgaatcaaaagtttattcaacaaattttatgtaattttttaaaattgcataaaatgtgtgcaaaataaaaagccttcatacttctccgaaaatttattttcagtgaaagtatgaaggcttttttacatcatatcaaacaacgataactgattttcatcaggcaggtcattcaatacgttattttctgttaggtattcgatcagtgtcttggaaactttcccacggttggataagtcttctttggataagaatggcttttcttcgcgggcggaaacgatttgtttggcgacgttaccgcccaaacttgggacggcgcggaatggtgcgagtaaggtgtgatcgtcttggatcaagaagtcagatgaatctgatttttcaatgtcgaccatcttgatgttaatgccacgttccaaacattcgttggcgatttcgaggaccgtcaacaaattcttttccttggcgctggcttccatccctttatcggtgatttccttcatgcgggccttgacgccttcttttccttgggccatggccacgaggtcgaaatcttcggcacgcacactgaagtaagcacagtaatagataattgggaagtaaactttgaagtaagcaatccgcaacgccattagaatataggcggtcgcatgggccttggggaacatgtacttaatttttaggcaggaatcgatgtaccagtctggcacattttcgttgtcgcgcatggcttgttgccagtcatccggaatccctttacccttacgaacccgttccatgatgttaaacgacatgctatcatccataccccagtgaattaaatccatcatgatgttatcacgacaaccgataacgtcttttagagtgacaacgcctttgttaatcagttcttcggcattacccaaccacacgtcggttccatgagaaagaccagaaatttgcagtaattctgagaacgtcgtggggtgcgtttcttcgagcattccgcggacaaaccgcgtcccgaattctggtacaccgagcgtgcccattttcgaattaatctgctctggcgttaccccgagtgaatcagtgccggagaacaaggccatcacaccaggatcatcggttggaatcgtcttgggatcaatccccgataaatcttgcagcatccggatcatggtcggatcatcatggcccaggatatcgagttttaagatattatcatggatcgaatggaaatcaaaatgggttgtcttccaggctgcatcttgatcgtcagctgggaattggattggtgtgaaatcatagatgtccatgtaatccggcacaacaatgattccggccggatgttgaccggtcgttcgtttaacgcctgttgagcctttggcaagacgatcgacttctgcgccgcggaaagtttgttcggtatcacgttcgtaggctttgacatagccgtaggcagttttatcagcaaccgtcccgatcgtcccagcgcggaacacgttattttccccgaacaagactttggtgtagttatgcgcaaccggttggtaatcaccggagaagttcaaatcgatatcgggcactttatccccgtggaagccaaggaaggtttcaaatggaatatcatggccgtctttatcaagtggtgtcccacattcagggcagtccttatcggctaaatcgtaacccgaaccgacttcccctttggtataaaattcggagtaatgacagttgggacagcgataatgtggcggcaatggattaacttcggtaatcccggtcatcgttgcgactaaactcgacccaacggacccccgggaaccaaccaagtacccatccttaccactcttatacacgagcttttgcgaaatcaggtagataacggagaacccgttcccgatgatactcttcaattccttatcaaggcgggcctgcacgatttcagggagttcatccccgtataattcatgcgcacgattcatcgttaaggtttgaatttcatcttcggcacccgccatcttcggcgtgtacaacttatctttgaccggtgtgatttcatcaatcatatcggcgatttggttcgggttcgtcaccacgagttcttgggcaatatcggcaccaagaaaattgaacgctgtcaacatttcatcggttgatcggaaatgaacatccggtaattgtgaccggttcaatggattagccccacccattgagtgaatcaaaatcttccgatagattgaatcttctggattcaaataatgtgtatccccagttgcaaccactggtttatccaattcagcaccgagtttgaccatgttgcgaatgatttcttcaagcgcccgattatcgcgaactaattcacgttctaataatggtgcgtaaacggcttttggcattacttcgaggtaatcgtaatacttcgcgcgatcgcgtgcttcttggtagcctttttgcatcatcgcttcgaagacttcaccgctggcacaagctgaaccgactagaatgccttcacgtaaggcatccaagcgactctttggcaaacgcggcgtgcgataatagtattcggtcatcgatgctgaaaccagtttaaataagttcttcaacccagcttgggtttgcgccattaaaatcgcatgcgctggccgtgcttgtttatacgcatcgccaatcccaacgcgatcattcagttgattgacgttgaccatcccatacatgtcggccgcttcggcttctaatttgtataacaaataaccggttgattcagcatcggcgttagcacgatgatggtgttccaagttaattttataccgcttggttaacgtatcgagtttatgatttttgtattctggatgaagcatccgagaaacttccaacgtatcgatgacgggattttcaatctgaccgaggtcgttacgaccatagccagcattgataaagcccatatcaaacgtgacgttatgcccagctaagacagcatcgcccgcgaattctttgaacaacgctaggacttcggcttctttcttagcaccgtgcaccatttcattggtgatactcgtcaattgcgtggtgaaagctgatagcgggtgaccgggatcaataaattcatcgaacgagccaatcacttcgccatctttcattttgacagcggccaattcgataatcgaatcgtaaacggctgacaatccagtcgtttccacatcgaaaatcacgtattcagcatggtcgagtgcttcatcgcgcaagttatacgcgactggcgtgccatcgttgactaaattgacttcgacaccgtacaaaatcttaacgccgttcttcttccctgctgcataagcatctgggaaagcttgtaagttataatgatcggtcaccgcaatcgcggattggccccatttagcggcttgttgaacgaagtcgccaatcttgttggtcgcatccatttgtgacatattggtgtgcaaatgcagttcgacgcgcttgccattttcagcggtatcttggcgtttgggatggctaacttcgaccaaatcattggcattgaccacgagatcgcgcatgaagttatcttcttgaacactcccgcgcaccttgaaccacatgcctttatcgatggctgcgaagatactttcgtcgccgttatcccgggagaatttcttgaccgtaaatgatgatgagtaatctgtcatcttcaaaatcaagagctggcggccagaacgtaaaacgcggacttctttatcaaagacgaacccttcaatgacaacggaacgttcttcttcattgattgtaatcatctgacgggttggttcagcaggatttaagccgcggcccattgaaatcgggccatcgactggtttgccttctgattgacgtttttctttgagtgcttcatttttcttgatcgcttcggctgccgcttgtgcgcgggctgcatcttgttcagccttcttcgcttgaaaatcttcgattgccttttgtgaggcggattcgtcaatcaagggttgaatcgcaaacttgggaaaaccaagccgttgataaccagcttggattgtcgtttgcgcttgatttaagaagaacgtcttcacgatgtcgttttcgacaactaaaaagacgttgcgaccgtcgatatagggggtctctttttcacacaattcgtgcaacattgaagattgaatcccactatggttaatgacgtattcccaataagctgctaaaacaccgccgtccaattcagttgcatcggtggtgatttccactgaaacacccgcaatcgctttgaatgctgcttctagatactgttcaaacgttgtgtaaacagcatatggcaaaacggattcgaaatgtaatttaaaagtccagcgtttggatgtttcgtggacaacgacttgttctacttggccagttttgaagccaggataattcgcaacatccgcgggtaaatcaatttgttctaataatttttgaaacagtgcggtttgatctaatgccacaaaagggcctcctcatattcagaaagttaaataaaaggggctaggacaaatatcattctgtctcagccctttttagatgtccgaacatttataatgtaaacgtgctttttgaaactgcctcttgcgcttaactacaatccgcgaacgatcgacgttgtcgctcattcacgaatttaagttaatgcttggagccaaacggtttcaaacgcactctattcctaaacgtgcttttcaagctaactttctgcgcttagcgctgggaatcaaattatcgactgcgtcgttaattcgcttccctgtgctaatgctcaaaagttgaccgagcttgaacgcactctattcagcttctgttgtctctgaagccaataggatacttaatgaattaatcaattcatccttcttcacttctagggtttcacccgtcttacgtaatttaacttcgacgatttcctctgctgcttttttaccaactgtgatgcggattggtaagccgattaagtcactgtcggcaaacttaacgccagcccgttctttacgatcatcaactaagactgagtaacctgcttcttcaagtaagttttcgatctgttcagctaataagacttggtcagcatctttgacattgaccggtacgacatgcaagtcataaggggcaatcgcgcttggccaaactaagccgttttcgtcagcttgttgttccgtaatcgctgataagaggcgactcacaccgattccgtaagaacccatgataattggtttcgcacggccattttcatctaagaaagtggcaccgaattgttcagtgtaacgtgtgcctagtttgaagatatgcccaatttcaatcccctttgtaaagtgcaagttcccttgaccatcaggtgatgtttcgccttcttgaacgaaacgtaggtctgaataatcagctacggtaaagtcgcgcttgctgttgacattcgtgaaatggtgatcggcttcattcgccccaaccacggcattcaccatggcttcgacactgtaatcagcaacgatttgtaagtcttctggcgcgttaactggtccgattgaacccattggtgcgttcattgttgctaagacttgttctggggttgccatttctaagaaatcagcatctaagaagttcttcaacttcacatcattaacttcaaaatcgccacgcactaagaccaagaccggttggtcgtcagcgataaagagaacactcttgatgatttgttgcgctgggacgtctaatttagcagccacttcttcaattgtgtgggcatcgccagtcgctactttttcaagctctaattgcacatcacttgagttttgcttaggacggacactcgttgccatttcaaggttggcagcataatcactttggtctgaataaacaatcgtatcttccccaatttcagcaatcgcagaaaattccattgaatccttaccacccatggcaccggcatccccaacgattgcgcggaagtctaacccacagcgttcaaaaatgttggtgtaagcttggtacatttggcggaaagttgtatccaaatcagtttcattggctgaaaatgaataagcatcttgcatgatgaattcacggccgcgtaataaaccgtaacgtggacgatcttcgtcacgatacttcgtttggatttgatataacgttaatggtaattttttgtatgacttaatttcattgcgcaccaagtcagcgaaagtttcttcgtgtgttgggcctaagatgaagtcgcggccatgacggtccttgaacttgaataagttatcgccataggtttcgtaacgacctgattcttcccacaattcagcaggtaaaatccctggcatttgcatttgaacggcgtcaatcttgctcatttcatctttgatgatggcttggatgttttccaagacgcggaatgctaaaggtaagtaactgtaaacaccagcagatacttggtgaatatagccggcccgtaacatcatccgatggctcttagcctcggccgagttaggcacttcctttaaagttgggataaataattttgactgtttcataatctgttatacctccaaaaataatctaaaagaaaaagcgttgaatatcgttccatgtgaccaagaccattaagacgaccatcatgccgaccccgacaagggtgacaatgccttctttttccggtgagatgggtttaccgcgaatcgcttcaatcacgttgatcacgagcttaccaccatcgagggccggaattggaatcaggttcataatccccaagttgacggataagaacgctaagaagtagacgagcattgtaaagccttgactcgcgaattgggtcgtcattgaatacatgccgactggtccggctagtttattgagtgagaaaccacccgttaagaatgacccgagaattttaaaaatctgggtcgcattcgcccatgattgggtgaagccatatttcaacttagcccccacgctatggttgagtccagctgtcacaccaatttggccgactttccccttttgcccctcgactttcaccgctttaggtgtgatttcgagtgacttagtttgctttgcccgtttaacctggacattcactggtttattcggatattttgcaatcaccgagctgaaatcagtaaacgtcgtgacttttttgccagcaactttcactaaccggtcatccgttttaagcccggctttttgtgctggcgagtttggcatcactgtgccaacaatcgctttgttttgtgggacgccaccgtttaaaaaagcaaagagcgcaaacgccacaatcgcaaggataaagttgttgaacggccctgcgaagttggtcaacatccgattgattaaactagccgactggaattgaacatccacgggtgcgatttgcacttccgttccgtctgattcaacaatcgttgcatcgtgactgaccgaataacgctttaattcggattcgtcaccactttcatagccttcaatccataattctttttgcaagtcagtttttgcaatttgaaatgggacaccgtttaacgtggttactttgtcacttgtattaattttttgaacagtttcttgttcgtctaacagcaaggttgcttgcgtgccggcttcgatttcagattcatcatccgccatccccgccatgcggacatagccgccaagtggtaaccaacgaatcgtataagtcgtgccatttttgcgcgttgcaaataatttgggccccatgccaattgaaaattcacgcaccaaaataccagaacgtttcgccatgtaaaagtggccaaattcatgcaccactactaaaatgccaaatatgataataaacgcaataatcgccgccaatagagtacgactcccttctaaatgcgtatttcaatactctcatttgatatgaactgttatattatatcacgaattccttagaaacaagaaaagcgtttagcgcaaaccaaaaagttgcgctaaacgctagataatattgacttttaaaaacgtgctttttggttgcaacaacttccgcttaatctaaaatttcaaataatcctaaaaccgggattattcgaatttttgtattaatgctcagttgctaaccgccacaaacgcactctaaatcatgccaaacaagtgtagtagcggtaagacaaacaacatgctgtcaaagcgatctaagatgccgccgtgacctggtaagattttacctgagtctttaacgccataatagcgtttgtaagctgattcgactaaatcgcctaattgaccggcaattgagaagatcaacgttaaacctaacatgacaggcattgaataagcttgtgggaagaagtttaaataaatagctgcgaccactaatgctgataatgtcccgccaattgaaccttcccaagttttattggggctgatagctggccacattttattcttaccaaacatccgtccgaatgtgtaggcaccgatatctgtcatccagatgaccaataagatatacatcaccgtgtcaaaaccaccaatatttcgcgttgcggctaaataatggaagcctaagccgatatagagactggctaaggttgtgacacccatatcatcgaagttaacccggtttttcgtgaagactgtgatggctaataaaatggcaacgaagaagtagaataaatcaaattgtgacacacctgctggtaaccagttaaaggcgcctttgggtgaggctaaacttaacaccgctagtccggcaatggttgcatcaggtgagacaataattcgtttacgcatgatgaaaacttctgataaggcaacgagtgctaaaacggctgccgcgatatcaatgtaaataccaccaaagaaaatgatggggataaagatgattaaagcaattgttgctgtaatgacacgttgtttcataattgtatttcctcctatttaagaccgccaaaacgacgattacgtttttggtaagcgccgactgagcgttcaaacactgctggggtaaagtctggccagaattcatctacgaaaacaagttcgctgtaagcaatttgccagagtaagaagttcgaaattcgctcttcgccactcgtccgaatcaataattctgggtcagcatattcccctaaaaagccagtcatcaagtaatcactaatcaacgcatcgtcgattgcatcgacctcaattgtaccatttaccgcatctttagcaatctgcttaaccgcttgttggatttcgtcacgcgacccataattgagtgcaaagttcaaaatcatccctgtgttatcagccgtatcggccatcgcattgttagccgctttttgcgtcttttctggtaattcttgaatattacccatgactttcacacggacgttttcagcaatcaattccggcatgaacgtatcaaaaaaatcgaccggtaactgcatcaagaagttcacttcgtcatttggacgcttccagttttcagttgaaaaagcgtacaacgttaagactttaacacccattcgactggccgttttggtaatcgtcttaacgttttccattcctgctttatgcccagcgattcttggcattaagcgtttcttcgcccaccgaccgttaccatccatgatgatggcaacgtggttggggatgttggtgggatctagttgttgtgcgtctgtttttttatttgtaaacaccacatactcctccagtttcaataactctcatatgattgtaccaaaaatcacaggaagtgactatttaaaatcaaccgattgtcaccggcattgtacaaactgaaccgcccattctgcgctttttgagttcttcccagatgatttttatccacgattaagcctttaataccaacgattcccgccacaacgtactgttgccgctatcacattgaaatttattgttaaatattagtagattcctatagttattggcatgtaacaggttaaatatgataaactgatacataccttaaacagaaaaagggagtttattatgcgaaaaaccttcgaactctttcgacttgattggcgtcgaatcttcaaaagcccgatcgctcttctattaattattgccctcattatcattccatcgctctacgcgtggtttaatatctgggcgttatgggacccttatagtaaaacgcaagacttaaaagtcgctgtttactcagccgatcaaagtgttgtcattgctgacaaaaaagtcgagattggcgccgaactaattagccaattaaagaaaaacgacaaattaggctggcaatttacttcgagcaaaaaagaattagatgacggcgtaaaaacggggaaatactacgccgggatttacgtgcccaaaaacttctcaaaggatctcgttagtttcgtcgatggcaagattcaaaagccaaagatagtctactcatctaatgataagattaacgcgattgcgcctaaaattaccagtgcaggtgcaactacgcttcagtccaccatttcagaagaattcgtctcaaccgttggtaaaacattgatgagtaccctaaacaaggccgggattgatctcaatacaaatctccccgtcattaatcgtttctcgagcctcattctcaaaacagaccaacaaattccagaaattaaccaatacgcagaacaagtgcttaatctacaaaagaaactaccggaaatggcattaaagcttgcccaagccaacgagttcgcggcctttttaccacaagcaaatgccatggcgcaaaaagtagtcggcatcaatcaatacttaccacaagttgaagcagccggtcagctcgcaacgaaagttcaggctaagattccagaaatccaaagtgctggcaaacaagttgccacactcgattctgatttcgatggcatcgccaatactttaacgaacggcattaacgaagctcaaactggtttagatgtgttaaacaaaacacaaaaagtcttaccggacttaatgacttttagccaaacggcccaaggtgtcgcgggtcaattacaatcagacctaatccctaaactccaagctgctttaccggtcattcaaaaaacggtggatcaagggttagccattaccaatcaattggcaactaacatttcaactaatttaacggccgtcaatagtttgctgagtcaactcaaagaggatcccaataatgctgaactcaagcaagcgctcaaagaagcgctccagaacttatctgatcacaccgctaccttgcaaacccatgcgactcaacttgcgacaaccctccaaaacttgcaagacagctacaatcagtcagcagtggcgaatggtcaaccggaatcacatgcacttgatacaccgattaaacatttaaatacgttggcgacccaactcggcgtttttaaaggccaagttgatgaccttctcgcccattacgatgatttatcaattgacgatttgcaaaccaagattaatggtttgattcaatacgccgaccaagtcgaagacagcgtcgctaagattcaagcggcccatatcggtgacagcgtcaaaaatatgctcgaccgcttttcaacattaattgctagcggtaacgccgtcttaacacagcttaacggcgaagttttaccgaaactccccgcactcttattcaacacacaaaagacgctccaacaagccatcgactatctgcaaaaatatgctcagcagttaccagcgttgaaacaagaaattcatgacgcgaatacattattaaatggcaatctgggcacgattatctctggattaaacaccgcttctgacgtttaccagaatgactacccactactcaaaaataaactgcaactggcaaccagtttcatcaacaatgacttaccaggcatcgaaaacgacttaacaacgacgctcaacatggccaacgagaaattcccactcgttaaaaccgccttaaatgatgcgaccgacctcatcaacaatgattggccattcttacgtagcgggatccaaaaaggcgctgaggcgattcgcaaacaacaaaagacggtcgatctcaaagatctgattaaattgcttcgccgcgatgcaactaaggaaagtaatttcttagccaaaccggttgaactgaaagaaaaacacgtctacccgattaagacctatggctcagcaagtgcgccgttctacacagccctttgtctctgggttggtgcacttcttttgagtaacatcgtcttaaccaacttcgcgttagacgacaaacaaaagaaacagtacactaagaaacagcaatttattgctcgctggctaacctacatcgtcattggtgtcgcccaagccgtgattgtgacgcttggtaatattttcttattgaaggcctacatcgttgataaactaccgctaatcttattagccgtcttcctgagcatggtcttcatgacaattgtttacgttctcgccgcgatgttcgggaacgttggtaaaggaattgcgatgattgtcttggtgctttccatctctggcggtggcgggaacttcccagttgtcctctccgatcaattcttccagtttattaaccccattttaccgttcacatacggggtcaacctcttacgcgaaccaactggtgggatttacgcaccgaacctctggcataactttatcatcctagcgctctttgcggttgttttcttcctaattggcctcttcctgaaagatcgaatcaatccattctttgaaaaactccacaaagaagcgacgaagagtaaaattattcattaacgcaaaaaaagccccgccactgttgtggcggggctttttgcatccattagggattaaccttctgtgatttctttttctttgttcttggcgatttcgtcaatcttcttcgttgcttcattcgtcaatttttgaacttgttcttctaaatcatgcatttcatcttcactaatctcgcttgctttttcagcttttttcaagctgtccattgcatcacgacgtgcatttctgatggcaactttgccgatttcagcttctttaccaacttctttagcaatttccttccgacgttcaccagttaattgtggaattactaaacggattactgagccatcgttggctggtgaaatccctaaatcagctgtataaagagctttttcgatatcttcaagcgcacccttgtcataaggggtaatcaacaagacccgtgcttctgggactgtaattgcggcgatttggttaagtggtgtcattgcaccgtaatactcaacattcacgcggttgaccaagcttgcattcgcgcgaccagcacgaatttggcctaatgttctttgtaatgaagcttctgctttttccatgcttgcttttgcttcatctaaaattggatttgccatattattctcctccttcgatcgttgtcccgatgttggcaccttcaacaacttttttgatattgtttggttcgtttaagttgaagactaccaatgggatatcattgtccattgataaagtacttgcagttgaatccatcacttgcaagcctttgttgataatatctaaatgtgttaatgtgtcgaatttaacggcacttgaatcagtgttaggatcagcagagtaaacaccatcaacgttgttcttagccatcaagatcacatctgcatcaatttcagcagctcgtaatgcagccgttgtatctgttgagaagtaagggttccctgtcccaccagcaaaaatcacaacgcggcctttttctaaatgacgaacagccttccgacggatataaggttctgcgatttgacgcatttcaattgatgtttgcacacgcgttgggacaccaatgctctctaagttatcttgtaaagctaaagcattcatgaccgttgccatcatgcccatataatcggcttgcgcacgttccatgcccatttgttcaccagtcacaccacgccagatgttcccaccgccacagacaatggcaatttgaacccctaaatcgtgaactgatttgatttcgtttgcgactactttaacaatttcagggttaattccgaaaccttggtcgccagcaagtgcttcaccactcacttttaagacgatgcgtttgtattttgtatttgacatgtttgatatccctccgttgattactaggctcattttaccatatttaataagttatttgggtatgcgattctgaattatcgtaaaactgcaaaaaaaaggagcgcaaattgcgttccctttttgaagcaaaataagcttatttgatttggcccatgacttcatcaacaaagttattttcttttttctcgatcccttcaccaactgtgaaacgaacgaaacctttaacgctaccgttcttagatgcaacaaattgtgcaacagtttgatctgagtctttgatgaaagcttggtcgttcaagctgatttctgacaagaacttgttaacacggccttcaacgatcttaggaatgatgttttctggtttgccttcgttctttgtttcttcagttaatacttcacgttcgtgatccaatgtttcagcaggaacatcttcacgagaaacgtattgagggttaacagctgaaacgtgcattgcaacgtcatgagctgcttcatcgtcagcaccttctaaagtaactaatgaagcgatttggccaccattgtgtaggtatgcgccaaagtgatcgccatcatttttttcaactaattcgaaacgacggaagctgatcttttcgccgataacagcagttaagttgattactgagctagcaattgtgccttcgcccattggtaatgcttctgcagctgccatgtcagctggtttgtttttagcgattgtttcagcaatatctttcaataaagctttgaattgatcgtttgaagcaacgaagtcagtttctgagttcacttcaacgattgcagcagtgttaccatcgatggcgatgcctgctaaaccttcagcagcaatgcggtcgctcttcttagcagcctttgccatccctttttcacgtaaagcatcgattgcttgagcaacgtcgccgttactttctacaagggcttttttagcgtccatgatcccaacgccagttttcttacgtaattccattacttgagcagctttaatttcagccataattcatacctccgacaatttatattcaatataattggtttaaaaaaagctgtcccacaagtcaggcagtatttgcgaaacctctaagacagcttatttgaatctactatttagcgtcagtgttagtatcgttgtcgccttcaactgcttcaacgatttcttccattgagtctgctgatttgttttctgcagcaaatgtagcttcttcaacatcatcttcaccttgacggccttcgatgatagcatcagccattttagctgtgattaaacgaacagcgcggatagcgtcatcgtttgatgggataataacatcaatatcatcaggatctgagttagtatcaaccatagcaacgactgggatatttaatttttgtgcttccttgatagcaatgcgttctttacgaggatcaacaacgaacattacgtctgggatgcgaggcatatcttcgataccgcctaagaatttttcaagtttttcttgttgtttcttcaacaaggcaacttctttcttaggtaaacgatcgaatgtaccatcttcgtccattgctttgatttctttaagacgtttgatccgtttttggattgtgtcccagttagtcaaagtcccacctaaccaacggtggtttacaaagtattggcctgcacgtactgattcttcagcaattgcatcttgtgcttgtttcttagtaccaacgaataagaatacaccttcgttagcagcttcttctttaacgaagtcataagcatcgtcaaccatgcgaactgtcttttgcaagtcgatgatgtagataccatttctttcagtaaagataaatttcttcatttttgggttccaacgacgtgtttggtgaccgaagtgaacacccgcttctaataattgtttcattgacaatacagccatgtcaacagacctccatatggtttttttcgaccactggtttcacttttttagagaacttgtcgccaagcacctctctagaaatcaaccagtgtgaattattttttggtattgaaataccgtttaaaagtatactaaaaataacaaggcgcgtcaacaagaacttacatgccgcccaattgtttctgataacgggttgcatcttgtggttggtggctcactgaggtaacgccactcactgtttcaaccgctcgatagcccgcttttagcgcgacttgctgactcgccacgttttcgtgtgcagcaatgatactcaactggtcaagttccaattcactggccgcgtattgttcaatggcggctagtgcgcgatgcatgacacctcgtccgcggaaagcttcatctaaccaatagccaacttcacccgcacgattcaagtcgtcaatattgtggacatcaatcgtaccaactaactggtggtcatcccaaatcgttgccatccaaagttcctggtttgccatttgttgttgcgcatattttaaaaagccaagttcatcggccactgattcgatatcgcccacccatggtaaccaagtatcgagattgacgcgattttgatccactaactgaaataacgccggcgcatccgcttccgtcacaggttgtaaatgaatgtgttgatcgacaactaacttaggttgcatattggtctctccattctaaaattgagttcttgaaatgccatgttccattaaatattgttcttttttgcggcggggttgatgtttgaacgcatactctgctttaagcgccgccgatttatcactaaacgtttcaaaatataataaccgcactggtcggcgcaattttgtgtacttcgcacctttgccagcattgtgcgtggcaacgcgtttggtaacgtcggtcgtgaaccccccataaaaactatgatcggcgcagactaatacgtaaaaataataagccttctcagtcattgtcagccatgaataacttcgtgcgcatctctggtgtatagtggctgtcttggtcataaatcgtcagttccggaagcattcgtaagcccccttttttaccatctttgaccgcttcaattaacaccatattcgcttctttgcctgctttgggataaacaaaccggacgcgtttgggttccatgcgtgcggcgcgtagttcgtcacagatttctaagaaccgttcgggacggtggactaaataccctttaccattcatctttaacaggccactcatggtttgaaccacagtgcgtaagtccgttgcaatctcatgccgcgccagtgccagatgttgattgggatttttttgactattgggttcaaccttaaaatatggtggattacaggtcacaatatcgacgctgtccttatgaatcttagtgttaacgtctttcaaatccatattgagcattgtcacctggtcggttaagtcatttaattcaattgaccgttgtgccatgtcggccaaccgttcttgaagttcaacaccgataatttgaccatttgttttgggactcatgaataatccaaccgccccattgcctgcgcacaaatcgacaatcgtcccgcgttttggtaactgggaaaagtcggctaacaacaccgcatccatcgaataggaaaagacggatgggctttgaataatctgaatatctaagcgaaataattggtcaattcgctcatctgcttttaacatcgttctaccttcaacctcatttgtatttaggcatattataacaaagagtatcattatttggtataatgagcagatactagtcacgtttgaaaggaatctaaactatgtttttctcatttgcacgttttatcgtccgcattttagcctggttattgaatggcaatttgaaggtcgaaaataaagaagccctgcctgaagggacttatgttttagttggcccgcaccgaacttggtgggatccaatcttcttcgcacttgctgctagtccccgaaagttcacgttcatggccaaagaagaactctttaaaaacccaattctacgcttcatcttaacccacgcaaacgcatttcctgtgaaccgaacaaatcctggcccatcggcgattaaaacaccagtgaaagccctccgctcaaaagaactttcgttaatcatgttccccactggtagtcgctattcaagcgaacttaaaggcggcgcggtcgtaattgccaagatggcgcgggtcccactcgtaccagcagtctaccaagggccattaaaattctctgatgttttaaaacggaaaaagattacgattcgttttggtgaaccaatcccaatcgatccgaaattaaaactcaacgaagaaaacttagaagttgtcaatcatcaaatgcaagccgcatttgatcaaattgaccacgaaattaaccctgattttaaatatgaactacctgataaaaaataataacaaaaaactgctagatgatatcatctagcagtttttttagcgcgttaaattcttaaccgcattcgtcaccaatagataggccgtaactaatgccactgcaatccagccaaattgtgttggaatcgcttggaaatcaacggcttgtctgagcgatgtcaataccagaatacctccaattaacaaactgattaaactccccaagtaaacacgccaatttgcgcgatccttgaacggtgatgctggtgtccgtaatacataaaccactagcatctgcgtcaataaaccaacgacgaaccaactcgcttggaaagccccctgttgagctgatgtttgcaggccaaatccaaaccagagaatcgcaaacgttaagatatcaaccattgagctcaacggtcctagaataaacgcactcttcagtaagcctttagttgcccactgtgttggttggcgcaattgatcttcagcaacccgatcccaaggtaaccagagttgtgcgacatcatacagtaaattctggacaagaatttgcagtgacaacattggtaaaaatggtaaacagatgctggcaaccagcacgctcaaaacatttcctagattagaagctaacgtaatccgaatgtacttatacatattgataaagactctccgtccttcaagcaccccgtgttctaaaacgttcaaatctttttccagtaggattacatcgctagcatcctttgtgaggtctgcggcattatcaactgaaatcccgacatctgcttgtttcaaagctgtcgtatcattaatgccatcgcccatgaaaccgacgacttccccttgtgcttgtaataaacggattaaacgcgctttttgaagtggagccaatttggcaaataatgcttgctcggttaatagctcactgacttgtgcatccgttaacgtctctaacatctcaccagtggtcacagctagatcctgaatgcccactttttgggcaacttgctgcgtcgttaaagcactgtcacccgttaaaattttgaccgccacttgatgagcttgtagttgttgaattgccgagatagctgattgttttggtgggtccaaaaagccggcgaaaatcaaaccttgattaccaacgcggtcaattgatgccgtctctgctaactcatcttgataagcaaccgccagcatccgcatcccttgttgtgccaaacgatcatgcactgccactaggttctgcttttgcacttcagtcaacggctcaatctgatccgctaacctgacttgggaacacgttgctagcacttcttcaaaggccccttttggcactaattgattacctgcatggtttttgagccagaccgttagccgccgctcgaaattaaatggaatctcgcccaatttttaatatggaaagtcatcattggtttggtcttgttcatagtaatgaataatcgcttcatccagaaggttctgccagccggattgacccttggcgttcaaatatgctaatcgcaaaacttgcacatcccgctttcctaaaatatctgcatagtacatcaatttaatatgatcttccgtcaacgtccccgttttatccgtacataaaaccgacatcgccccgagattctgaatggcctttaactgctttacgatgacctgttgttgacttaaaacgacactgcctttcgccagattactattgacgatcatcggtaacatctccggtgtcaaaccaactgccactgccatcgcaaagaaaaacgactgttgccaatctcccttagtcacaccattaatcacaaatacaaagggcaccaaaacgagcatcatgcgaattaataaccaactgatgtgttttaaccctgcatcaaattgattcggtcgcgacttaggttcagtagtcacaattgcgctaaagcaagtcgcttgacccgtggcaatcactaacgcggtagcttgcccattgacaacggtgctacccatcagcaataaactcgccatatccgccgcattcgttacgtcagttgcttgcgctgttatgcgtttgctcacgggttttgattcacccgtcaaagaagattgattaatttgtaaatcatggctcgccagaatttttaaatcagcattcaccaaatcccccgtctgcagctgcacaatatccccaggtaccagactttgtgcggcaacttcagttggttgaccctcaattacaacccggctggtctttgccaacatcgcttgtaaagcaatgctcgcttgctcggacttgcgctcttgcacgaatcgaatgctactagacacaacaatcatgattaacataactatcgcgccatcaatatctcgactgagccaggagatgatcattaagacggctaatacgccgataaacggatcttgcacgctctgccaactagctcgcaataacgaacgctgttgccgcttttgaatcgtattttccccataggtttgtaaccgtgctgttcgttgctgccgtgataaccccttcttgtcagtttcgaaatgttctaaactcgcttttggcgttaattgattaatctgattgagtgtcattttaattgtcttagccatcgtaatccctctcattcgcagctgatccgcataaaaaaggcatcctcaaagaaaggatgcctcacaagaaaaacaagccattccaatcgttgagctttagcactatatgacgtagaactttgttcagctacattagaaaaagccttcagggcagtttctgttgactcaattggcatctctcgatgtttctgagtagcagcgtttgttcatataggagcctcacctaacggattagcgatatcaatatatttatatatctatcacaccaaatcgacttcaaaatacaattaaacagacttattgaagatattcatttaaaaattgcgcaactttattacgataggttgttggatctgtagccaaggcttcaccatgagctgcccccggaaccacccagagttgtttaggcgcatgcgccgctttgtaatttgtatacaccattttggttggtacaaatttatcttgatcgccatggatcatgaagattggcaatttcgagttagctaaactcttagcagtatcgccatcattaaagttatagccggcgcgaacccgtgccatccaattcgttgtgtaaaataacgggaatttcggcaatccaaagagatcgtttagttggtatgcgagttcgtcagcaatgctattatacccacaatcttcaatcaccgctttcacctgcttaggtaattcttcacccgcggtaaacatgacggtcgcgccacccatgctgaccccgaaaagggcaatttgactatcctgtccgttggtagcgacaattttttgggcccacttgacgtaatccaagcgatccgtccaaccatagccaatggcatcgccttccgattcacctgctgcacggtcatccggcgcgagaacgttgtagccaagatcgtgatacatgtgaatatagcgtgccatatcctcttttttacccatatagccgtgcgcaactaaaattgttttgttcgtaggttttgttgctggcacataaattgccgccaattttaaatcatctgtggcagattgttgatgccactttgattgtttaacattttttaaccaacgttgattgtcttgatagactttcgttggcttaccaccatttaaaaatgatttttgccccggtacaaatgcgtattgatacatatacatagtggcaccaaatagtgctaccaccactaagacaacaacgctaattaacgaccatttcagccagcgtcttttcttcatgtgctaaattcctcccgatttactccgcaataataatagtcgtgtctttttttgaaactgcttattcttcactgccaccattttggagttgatacatttcataataacgtcctttttgagccactaagctatcatgattaccccgttcgacaatctgcccttgatctaaaaccaagattaattcagcatcgcgaatcgtcgatagacggtgcgcgatggcaatacttgtacgtccttgacgtaaccgagcgagaccagtttgaatcatcgattccgtttccgtatcgatattagccgtcgcttcgtccaagaccaagattttaggatttgtaaccaatgttcgcgcaaacgaaattaattggcgttgtccacttgaaaattgggcgccaccttcaattacacgagcatgatattgaccaggtaattgttcgataaagtcatcagcttgcacgaattcagccgctgcgcgaatttgggcatctgtaatctcttgattaaataatcgaatatttgatgcgacatcaccataaaacatgaatgcatcttgtagaacaagccccatcttgcggcgcagttctgctgtctgaaaactccgaatatcatgtccgtcgattagaatctgaccttcataaaattcatagaaccgcatcatgacattaataattgaacttttcccagaaccggtatgcccaactaaggcgacagtttgtccaggttcaacaacaaatgagatgtcatgcaaaatttcatttttcccatcgtatgaaaacgaaacatgcttgaattcgacgcgaccctcagtaatttcatttgcagcatcggcattttgagctggcgcatattcttcttgatcgagaattctgaaaattcggcgaccagcgaccattccatcttgtaatgatgataaagaatccatcatattggtcatcggattaaagaagttcccaacataggttgtgaacgcataaaccaaacccgccgtgacaaagctatgcagggctgagacaccaaacaagctcaagacaacgaccaatgccagtgtatagagtaaattcacaattggtgcgagcaacaacgagttcgttcgaatcatcgcttcgcgcgtttttaaatagtccgcgttaacttgttcgaattcgtcggtcaaccgtttttcctggcggaattgttggataatcgtaatcccttcgattgattcgttgagtttcgtattcaactgactcaatttttcacgcatatgccggtaaacccgcgcactgtaactactgtaataccagataacaattaacaatattggtagaaacgctgccgttgcaagggcaatttttggtgaaattaaccacatcgcaatgaacgctgaaatgattgaaaatgaaccgactaacaaggataagaaaacattccaataatcaatcaaggtcatcgtatcattcgtgactcgtgagacaattgaacctgccggcgtctgatcgaaataacgcatcccgagttgatggagcttctggaataaatcgcgccggacatcttccatcgcgcgttccgaacccattccaaaaaggaaagattggaaaaattgtgtaatggctttgagaatcacgcctaaaccgtacaacgccgcaacccccattaaaacttgggtggtcgcactctgattggttaagtaacgatccataaagacttgtagtaatcgtggtaataaaatattgatggtcgctaaacctgcggcggccacaattgcgccgataaattggcgtttatagcgtttcgtataaccaaagaggcgtttcatgatgtgcaattgctctttcaatggaactttcttggaccattctgattgatattgcttggccatcttatgcacctcctaaggcttgacttaattgttgcttcaaccacatctctgcgtaccaaccatctgcggcaaggagtgcttcgtgtgtcccacgttcggtgatttgaccgtcatccatgacaatgatttcatcggcgtgcatcacactactcaagcgattagcagtgataatggtggtttgatcagcccgcatcgttttcaaattcattaaaatcgcttcttcagtctttgcatcaacggctgatagcgaatcatctaagatcagaatttctggatcagtcataatcgctcgcgcaatcgcaattcgttgtttttgcccaccagataacgacacaccgcgttcaccaacgaccgtttcataaccttggacaaacgttaaaatatcatcatgcaccgcactcgaaatcgcggcattttcaaccgccgcttgatttcggtcaaaatcagcaaaccgaatattgtcgcggacatccgttgaaaataagaaattatcttgtggcacatagccgatactatcaagtaacgcatccagcgaataatcccggatatcgtgaccatcaatttgaatctcgccttgatactgatcatattcacgcaataataatttaatcagtgtggttttacccgaaccaacttttccgacaatgcccaacgttttaccttgtggcagagtgaacgccacctgtttgagcgttggttgtttgtcgccagggtacgtaaatttttgaacagcataatgaatatcgccagttgctagtgtttgaatcgcatccggtgcttcgacaatggtgctggtttctttcaaaagttgatcaacccgatcataactcgcattgccccgttccaagacgttgaacaagcgcccaatcgcaaacattggccaaacaagcgccgcgatataactaatgaacgaaatcaattgaccaatcgaaatgctgtgattcataaccaacgtcccgccataaatgattgttacaatgtacgttaacccgataatcaaactgatggcgggatcaaataaaccatcaatcatattcacacgtttattaatcgcaattgtcttcgtgacaatctcgttgaaatctttaatatcagcttcttcttggccaaacgtttttaagactttaatcccagagacactctcttgggttttatcattcaaccgtgaaaaagccgcctgtgattgcccaaacgctgtgtgtaaatgtgcacctaaccgtcgtgacgcaacggccaacaagggcattggaatcaaggccatcaacgttaagcgccagtcaacgaaaatcaccatcgcaataatcgttgtcccaccagtgatgattgaatcggcaaaggttaaaataccggcaccagccacttgttgaatcgcggttaaatcattcgtggcatgtgccatcaagtcacctgtccgatgtttttggaagaaggtcgtgtccatcttcatgaaatgccagaacaatcgactccgcaatgtccgttccagtttagccgcgccaccccaaatccgggtccgccaaccatagcgaaaaatatattgtaaaatcgctgcgcttaacaagacgccgagccacatgattaatttttgggccgttaattgtttggcgtccattaaatcaaccagggtcccaatcacttttggtggcacaatttggacaatcgccacgaggactaaaaagatgacgccccataaatagcggcggtattcttgtttaaaataccaccctagttttttaaaaattcccatgttgtgctcctatcctctaaaattcgataagtcctattataacaatcttaattaagccggacaatcatttgtatttccgttcttattatgataaaaaaagagcttctaacaaacgacttgttcgttagaaacccttttaaaaccgacttgactgttttattttttgttgctacgtttttgttgtgctttcattgagctcatcatctgatttaatttcttttcagatggtttttgacccatttgcatcatcatagcctttaacatttcttcgttaattggtggattgtcttggaaatacttcttcatgtaagcacgtgcgccaaagaaaccagcgactgcgcctaataaagccccaatgacaaataataaaatgcctaatcccatatcttatgcaccccttcctaattcagttcacttaaatagtttacacataattaacctaaaaagaaagcggaattctaagattaatcgtcacgcaagcctttttcccgttggatatccttcactttttcaggagtgacttccttaccttctttgtcatacacttgtagcatctcaacttgtgagcggaaactttcgcggaagtcctttaaataggcatcgcgcagtgtttgacgttctgctgtttcagcttcagttagtccttcagcttttgctttgtgtgctaattcattaattcggtctaatcgtttttgatccattgccatcttgttgccctccaattcaaactatttgtctattttggactaaaatccgtaaaatgtcaaaaaacacgaacgcttgtttgaaatcccgctataggtatgctaacatatagctattagaacaaatgaggtgctcttatgacgagaacagaatccaaacaattagaggtcttgcgttttatccatgaccgcgttcaagataaaggttatccgccaacggttcgtgaaatttgcgaagccgttaatttatcctctacttctaccgttcatggccatttagcacgccttgagaaaaaaggctttttacaaaaagatccgactaaaccacgtgccattgaattaacagcagctggtttgacagcaattggtgcatcacagaagaagattccggttctcggtgttgttacagctggggcgcccattttagcggttgaagaagcgaccgattatttcccgattccaccaagtctacaaactgaacaagatttgttcatgttgacgattcgcggcgaaagtatgattagtgccggaattttagacggcgatgaagtgatcgttcgtaaacaagcgactgccgataacggtgacatcgtgattgcaatgactgctgaagatgaagcaacttgcaaacgattcttcaaggaacctgatcattatcggctacaaccagaaaacgatacatttgaacccattattttgaatgaagttagcatcttaggtaaggtcgttggcctataccgcgacagaatgtagctatcaaaaaaggattcgccgttatggcgaatccttttttagcatgttccttcagccaggtccttacgtttagcgactgactgacgttacattttttcttaacgtgctttctgatgcaatttcttccgtctagccacgtctcgcaaacaacccgattgcatcggttattcaccaacctaagttaatgctcagactctcccagcttagaaagacatccattaataatccattaatttgaagatatcgtagtctttaattttttcgcgaccgtttaaatcgtttagttcgattaaaaaggctgttccgacaacaatcccacctaattcttcaaccattttgatggttgcggcgattgtgccgcctgttgcgagtaaatcatctgtgaccaacactttttgaccgggtttgaccgcgtctttgtgcatgtataatgttgattcgccgtattccaagccgtaacttgctgagacggtttcgcgtggtaacttcccttttttacgggctggtgcaaaaccaacgcctaatttgtaagctactgggcagccgacgatgaatccgcgggcttcagggccaacgatcatttcgacccctttactctttgcgtattcgacgatcttgtcggttgctgctgcatatgcttcaccatcagacatcaaaggtgagatgtcacggaatgtgacaccttcttcagggaagttgggcacacttgcaacgtaatctttaaagttgattgccattttaaattcgctccttaactctttcaacagtttgctactgattgaatcctgccagccagtctttcatctccgcgaaggttgagtaaacaagctgcttttccatgtcaattttagctaatcgttgttgataactcggtgcactttctaatgcgtgcttttccggttgttccgcggccgaaatgagaccacattctattttaacaaatcctaagtcaaaaaacacctgcaacataaaaattaatagcggcaatttaatttttagataagtcgctaattcccctaaccgtgctttttcaattcctggatgttgacgtaggtaaaccaagaaagtcgcaaactgtttcttatcaggaataccatcaagatatgccgaatacttactatagaagataaagctgattttagtggcctgttgttggcgataaaaggcttcaaattcatctaaatcagttggttcatcaaccacaatcaattctgcttgctgtgcgacatcggctgctaagatggcttggctgccggctgggatataactttgtagctgtgccagatgcttctcattgaaaaagacataggtgccactagctttaaacaactgttgcgtcaaccgattactccgttgatcgattaacacttgcccactcgtttgtaaatctttcagcatcaattgcaacgtcgtattgccgcgccaagtattctcacttagttgaccaactaatttcaactgttccaccgcttgtaaatcgtcgtacaacgcaccacggttaaatgctaagactgctaactgcgcttcttgatcaaccgccgtaaatttcaaatgcttctgatccgcaccgatctgcttcacattggtgacggatggcaccgtcatttcaatcaaaggttctgggttatccgtgccataaggagctaattgactgatggcttgataaacatcgggcgtcacatcagctaatgcgagttgtaaatcaaccgccaatgtgggtttcgttgttaaatcaatctgattatcagcggcataagtattcatcgccgtttgtaaagcagccaattgatcgactggcatcgttaagccaacagccatatgatgcccaccaaagtgcgtcaacaatgtgcgttgggcatcaagcgctttaaagagatgatatgcttcaacacttcgtcccgatcccttggcttggccagttgctagatcaattgctagcactaaagttggcttaccggtttgttcaacgatatgactcgccacaatccccagcacaccttcatgccagccttcatgtgccaacactaaggtcgcactagcttggttctcaggtgtttgtgccatttcgctagctagcgcagtaatttcttgcacaagaccctggcgctttttattttgttgttccacaaattgggcctgttccaccgcttgttcttcatcgaaagtcgttaatagattaacacctaagttggcatcacctaagcgaccaatcgcattcaaacgtggcccaatcccaaatccaatcgatgtggcgtcaagcgtttcttgttcaatacccgctgactggcaaagagccactaaaccgggacgactggtattttgtaattgttgtaagcctaagctaactaaaacgcgattttcatcagtcagtgacactaaatcacagaccgtcccaatcgccactaggtccaaactctcgtaagggatttcttccaataatgccgtagcgactttaaatgccaccccaaccccacataaatcactaaagggatactgtccctctggatgacgggggtgaatgattgctgtcgcatttggcaatgtacttggtagttcatggtgatctgtgaccactacatcgacaccgtgttcttgcgcgtaggagattggctctaagccactcaccccgttatcaacggtcacaatcaactgggtcccattttcaacgagttgcttatagacatctaaattgggcccgtagccatctttaaaccggttgggcacatatacttccacatcggcgcctaaactttcgagcgtctcttgcatcaaagcggtacttgtaatcccatcggcatcgtaatcgccgtagactgtaattttttcgccgcccatcacagccgcttggattcgatcgactgccgtttgcatatcatacaaagcgtatggatcatgtaattgaccgacattcggatgcataaacgcactgattgcctcaggtgttttgattcctcgttgccacaacaattgggctgcggctttcgggagtgcttcaactgccattattgcttgtaagtcttggtcagttggtgttgcttttaattgccattcatattgtgcttccacattaatccctcgctacttccaaatcattaacttacccattatagcaaagattattatatttcgtttaataatccaatcaatgcttttgtttatcagtccaaatgatatactgttaattgatacacaaggttattacatagggggaaacaaccatgacagttttagtattaggtggcgccggctacatcggctcgcacaccgttgatcaattaattcaacgcggcacggatgtcgccgttgtcgacagtctcgtcactggccatcaagccgccattaattcacaagcgcgcttttacttttaaaggaagctgatcttttttgtccgaacagcgttcggattaattttacaatctaccgtatgaaatgtttttcacttaaaaaatgacctcactctatgttaaagcctacaatttcctaatctatattttttattttaccaaaactacattgtgtagtatcttttaaatagttcataattacaatgaattttatagttacttactctttaacatatctctcaatcctcataaccaagaatgttgatttttaagcagtcctttagaatccggacatacttttagatcattcatattcgtttaattaactattgaaccactagaaggcacctctctactcattttacacttttcatccccaaaaaagatccatataagtaataacataatcctcaaaaaccacaaaaataacggccccatttagggaccgttatttttttacttttaaatcagcggattttcatccaccgccggcaagtatctgccagccaatccggcaattaccgttagcaagccaacgctaatcaggccggccaagtgaatcaactgactggttgtgtcagacattgcgacgctgccactgatttgggcaatcacggccgttatgtcttgttgccgcattacggctaggcccatcaagccggtgatcaagataaattgcattaggatactaccgagatacgtattccgatatttaataattaaggtttgggccggcgtcgtgacgccggtgtaataagcgcggtgatttaaaagaatgctgttggcactgccaaagaaactaatcaataagatgcctaataaaattagatgtggcgtaatcatcaaccacgcaccaacaacaaatcctagtaattggacttttaagtctgataacttcgaaaagcgcccttgcacgctctttcgaataacttgggctaaaatcatccccgcaccgtaagtcacgtaggtgcctatcatcaaactctgattttgaattgcgacaaaaatatagagcattaagaacgtttcaaacgccccgttaattaaagccgcaaccaaaagccaacccggcatcttcgttttagtgccgcgcgtgatgatcacccgcaagattagcgcgactaacccaatgacagcgactgtgattaataaccagacaaatttagcttcaaaaaggcgcagatatcttagcgcaaacgccatcgcggttgcccagacaaatagttccaagttattaagcgatttggtttgttcgacgaacaccgattcatcaagttgcttcacaaacggttcgaagcgttgcatgccaatgaaaccaatcaatacaaatagcatgataacaataaagactaaccgatatgaaaaatgactagcgatggtcaacagaccaaccgttattaggctaaaagccaataacgttttaatttcagtgcccataaggtgccatttccaaaccactcgctcgtgataataaacgccctcataggtcggcatgattacactggcgctggcccccaagataaaagccgccatatcggttagatacaaccacggcgaaatggccaataacaataaggcaccagcagctagcagcatactgatactagttattttaaatgaattctgcacgtggcctagactactcacgaataataagccagttttcaacgcggtatagaataagatatacggcatataagacgccactgactgcccgctatgaatcatggttaagccaattaaagggagaatttgaattaacttcgccaccgcaaagacaatcccttgtttaattttttcactagtcgctaattgttgcccatttgtcatcaatcatccctactttcattgattagacggtaccttatattgcgtctgatttcaaagaagtaccgttaaaagcctaaattgattgcacaaaaaaaacaccgtaagtcgtcgaaacgacttgcggtgttttgattaggattttattcccactccactgttgaaggtggcttgctcgtaatatcgtacacgatgcggttgacgtgatcgacttcgttaacgattcgcacagaaaccttttgcaagatatcccatggaatccgtgagaagtcagctgtcatgccgtcgattgagttaacggcacgaatcccaactgtgtaatcatatgtccggccatcacccatgacacccacactacggatgcctggtaaaactgtaaagtattgccatacagttttatccaagccagcgagtgcaaattcttcacggagaattaaatcactatcacggacaatctttaatttgtcttcagtgacttcaccgaggacccgaatcccaaggccagggcctgggaatggttggcgccatacgagttcatatggcatgcctagtttttcaccaaggtcacggacttcatctttaaataatgtatttaaaggttcaattaagctaaattgcatgtcttctggtaaaccaccaacgttatgatgtgatttgatggttgtcgcagtacttgtaccactttcgataatgtcagtgtataaagtcccttgcgctaagaaatcaattccgtttaacttagttgcttcttcgtcgaacacttggataaattcgttaccaataatcttccgtttcttttctggatcagaaacgccagcgagtttactcatgaaacggtctttagcgtccacttggatgatgttcaacccaaatttaccgccaagactttccatcacttgttcaacttcgccttttctgagtaagccgtgatcaacaaagatgctgaccaattggtcgccaattgcgcggtgtaataacaccccaacaacagatgaatcaacgccacctgaaagaccaagaaggactttcttgtcaccgacttgttcgcgaatcttttcgatttgcatgtcgatgaaatcgttcattgtccagttgtcttgggccccacagacgccaaatgcaaagttcttcaaaatatcgttcccgaattcagtattccgcacttcggtatggaattgaatcccataaatccgacgttcacggttttcgatggcggtgaaaggtgtattatcactttcagcaaccgttacgaaaccttctggaatcgctgtgactttgtcgccatgactcatccacaccgtttgtttttcaggaagacctttgaataagtcactgtctttgtcagtgactgtaatttcagccttaccatattcacgttctgttgatgcttcaacattcccgccgtttttaaaactgatcaactgcatcccgtaacaaatcccgagaattggaatccctagttcaaaaatttcggggtcaactgaaaaggcaccatcatcgtaaacactcattgggccgccagagaaaataattcccttaggggcgatcttcttgatttctgctgctgttgtcgtgttaggcaacaattcagagaaaatcccgaattcacggatacgacgtgtaatcaattgattatactgactaccgtaatctaatacgataatcttatcgaaatcttgcatgtccttttggaccaaacaactcactcctctttttaaaaagcaatttggtgtgaacaagtaacaccaaattgctagattcataacactaagtcaaactataatgtatctattttactgattaataatgaaaacgtcaatggattgacggccttcctgtgaaaaaactcattctattattaatatttacgtaggaataccttatcaatcacgtgatgtttcgttttatgcaaaatgacatcggcacgattacgcgttggtaagatatattcgtttaaattttgtaaattaatgtcacgccatacccgccgcgccatctggaatgcactctgtcggtcactgatggcgtatggataatagtagttggtcggatcatctttggctaaatcgagtaatagatcgaaacgttcaaggaaccacttcttgattaagtcggcttgcgcatcgacataaattgaaaagtcgaagaagtcactgacgtaaatctgctcagttgatggcaactgtagtacgttaattccttcaacaattaaaatatctggatcgtcaatcacgtcgaactcgtcgggcacaatgtcgtaaatctgatgtgaatatttcggtgctttgactggtccaacattatttttgaccgcattcataaattgaattagatgcggcatatcataactttcgggaaagccttttttatcaagaattcctttttgtttcagcgtggctgtcggatataagaacccatcagtcgtaatcatttgaaccttcttatccgggtaggcccggctgagaaggagttgcaacaagcgcgccgtcgtactcttgccgaccgcgacgctcccagcgatgccaatgacaaatggtgtcctatgtggcttaatctctagaaattcagatttttcggcctggcgcatctggtactgttcatagtgcatctgtatcagatgccgtaatggcaaataaatatcactcacatccgcaagtgaaatccgatcattcaatccccgaatctgttccagctccgtgtccgtgatgccagtatacgcgtcaccgcggccatgaaaaacccgccactcatcacgcgagatttcataatatttcatctcgttcttcatccgacaatcctccaatactaaacgcatccattttaacattaaaaacagagtgcgtcatcttgcgattatatttcgaggattagtctagtaccgtgaataagcgctatttagtagctcgccttttttctttataaatgattataatcagcatcccaaagctaagcaaactaaccaccgtccctattctctgaatcgtagttgttcgataataaacggtgattctaccagttcccttcaacgcaacttgtgttaacccagttcgtttattcatctgcattggtaatcgctgatgatggttgagttcggcaacgtaccctttgtaataaataaaggggacttcaacaactgctttttgatccgtcagtgccctgaaatcaaactgataacggccccatgtatgccgtacatttgtaatttttattttatgcggctgatacttaacgacctgttttttatgtcgcaaaattttctggtagtcggtttgagcaggtaaatactcatgtccggccccaatgtaataagggttgggcgtgttataggcagcattggttctaaagcgccaactttggttttgaatactattcgtagagtagatgacatttcctgcgcccaacaacagaattagcagataaaagtagtacttattctttaataaatggcattcatccttagcaactaagtaactcacaattgccgtaataatggcaaaaaaacgccacgggaactgaatcgtattgataattgtatgatccaacaaatgccacggcataatcgacgtcgtagctatgaatagtcccaacgcaatcccaattaaatcacggtcgtttttggaatagtaaaatagaccacacgcgatgcctaatccgagtagaatcgtgataccgacattcactgtattcgcatgaaaaacagcattcgttaatgaattaacaacaatgtctttaaagggtaatgtgcggtcagacaaaaatgccaggggttgtgcggttacttgaaaaatcgtggttgccatttgttctccaaccgctaagaaataacgccctaataaaccgattgctaataagccagcagcaatgagatactttaaacttttattttggtagaatctcttgagatttaataaggtataaataatgatgacaatgcccatcatttcaacagaaatcatatgactataaccaatagctgccatccctattgataacagataccaataccggtgctcacctttttttaaccgcgttagcatcacaatcattaatgggaaaaaggtgagcgcgatcacctcaccaatggcttgccgattaactaaatctgcaaaacgataaatactaagaccgtacatcaaagagaatattaatgcttgcttcttattaaaatccgctaattttcctgaaatatatgtgattaaaaacgtactaaaattaatcgcaattgcaaatacaataaaactctctttgattgatagtcctactactctcagaatagctggtaagtagagaaaagcatctgggtaaaaaagacctgccgcatagcccattccgccgatgaaaaagtaactgattctcggaaaccactctccctgtttaatcgaaagtgccaaattctcaatgcggttcatgtggaaatgatagtcagaaccagacaggattttattgggctgtaaatagacgattgcaaccatcgcaatacttaatagtccaaaaaataatagggttactgttaaggcatgtcgcctgtaaaaatactttaatctttgcatcatatactcctcataaaaatactttagtatcgataattgccattccagcatcagtctaagggggacgatcgaattataagtaagtataatataaataatgtaataatggacattatttatatataaactttaacgaatagaatcggtcaatgtacaatattttgtttggcaattaataagtaatccataagctaagaaagcgataagatgcaaaaaagcgggctaaataattattagcccgctttaaaatccattaaatttataaataaacattttaataattaaaagcgctttattaaaatattcattgtctattttctcgcgattacacttttcatccaatcaaaaaacgcccgcctttcagcgcgcgttttttctatttaattaacgtgtaatcatccgcatccacattatcaatcaatggtgacatgccacctgttgctaataaagtgaggcgatgcatcgctcttgaacagatcgtgtagagcaattgccgttgatcttcatgattgtagttggttgcgctgacttgccagccgataatcgcatcgaattccaaccctttggctaagaaacttggaacgactaacgtgcccgctgccaaacgttgattttcggaacgaattaaagttacttttgtaccactggctttcaacttagcggttaattcttgggcttgcaccaatgtcttggtgataatcgccgtcgttaacttatctgcttcatttttagcgagttgcgcattcacatcagcgaccaattgatcttcgctttgacgcacgatcaagtttggcttgtcgccttcacggttgaaggcttcaattttttgaccgccctttaagaggcccttggtaaagtcggtgacttgttcagttgaccggtatgaacgcgtcaattgaacgaccttcgtattttgcgcatcaaagagttgttgcacttgttgtaataggttcgtgctgttttctttggtgaaaatcgcttggttcaaatcaccgagtaacgtgaagcgcgccttagggaagtgcatcttcaagaaggccagttcgtatggtgtgtaatcttggatttcatcgataaagacaaagcgcatgtcgcgttcgccgtgcttaccggtcattaaatcataaagatgcaagtaaggtgtcacatctgataacgtcatttgtttggcctttaaattagcgacaaaatcagtcacatgatcattccagatttctggtgtcaggtcaaattcagccaaatcaaccaattgcggcacaacccgcatgaagtggacgtattgtgcttgaatactcaagaagcgattgcgttgaattcctttttgaacgggtttgaaagccttcaaaacgatttgtttagcgatatatttactttccgcttcaccagtcttaaagtccttacccgccataatttcgcggagttcctcatcactcaagttttcagcgcgttctgtcacccagtccgccttggtttcgtggtcgactttatggctcaaactgcgcaataaactttccttcgtcgcatctagccggtttcctaaatgatagttttcgttgaaacggtaatagacgtcgctgattttttccttactaatcaagaccttcccgttcactttcaaatcacggaagcgcatatcgcccttttcaagatgcgctgcgtaacgtttaactgctttatagaagactaggctttctttcaaacggctaatccgcgcatcagtttccgtgattggggtttcaaattggtcaaataaactctgaacagcaaggttcggcaaacgccgtgcaacatattgatagtaagtcatttgaatcatgttttgttcgccaagttcaggcaacacgtcagcgatataatcgttgaacaattggttcggcgagaacatgatcacttgactggaatccaggttaccccgataccggtaaagtaggaaggcaatccgttgtaaaatcgcggatgttttcccagaaccagcggccccttgcacgaacaataagtccgcgtcagtgttccggatgatttgattttgttcccgttgaatggtcgtcacgatactcttcatttgtgtatcagacttttcgcccaatacttccagtaacatttggtcaccaattgtttcttgcgtatcaaataacgccttaatttggccatcttcaattaagaattgacgtttcaaagaaatattgacgtcttgcgggccgtcaggcgtttggtacgtaacttcaccagtcttcccttcatagtaaattgatgaaataggtgcccgccagtcataaatcaagaaatgatcttcgcgatcggtgaatgaccctagcccaatataaatggactcagactttggttcacccttttctttaaaatcaatccgcgcgaaataaggggttttttccattttttgtaaagtctcaagttgccgggaagattgttgccaagaattattccgttcttgcaacatttgccgttgttgttcgattgagactgccgtttcagtcattgctgaatcattattgaaattcaaccgtacatcattaaagaagtttgcgttaatttctttttcttctgatttagcccgttcaacggcgccttcgaagtgcttttcggcgtttttaattaaaccgacaatctcggttaaacggcgttgttctaatgatttttgttcgtcagtcaaagcagatgtcccccgatttctaaataaacagttctacaagtttaacactaaattcacaagagtgcgacgataggcgcttatattttgagcattaactggatttaccgaattggcgatgcaatcgtcggttcggtaaatttggttaagcgtagaaatatgcctatcggagcacgtttagagtgcgtttgaaacggtttaactttcgaggattagcctaatcagggaaataagcgatgtagtcgattgttttcctgatgtagctaagcggaaaaagttatttgctaaagcacgtttcacgatcttcccacaaaaaagccggccgctgcaaccactagccctaacccgtaggttaatagcagataaccaaagaaaatatggtaacggcggcggaaccacagctgactcaattcgctattgaacgttgagaaagtcgtgtagccacccaagaccccgacgcccaaaaagagcgtccacgtttgatccaattgtgccccggtcacccagcctaagcaaaagctccccgttaaattaattaaaaaggtgattaatggatattcgctggcaatctgcgttccaagacgggttaattgataccgcaaaatagcgccgattgccgcgcccaatccgacaattaataacgtcatcattttagcacctgcgactttccttgccgatcgagcagccaaactgcccagtaatctgccactaaacttaagcagacaccgccaatcaaactaatcccgatatacaggctaaatggccaccattgattggccaccaataacttcaatgcatccacgctaaaactagaaaaagtcgtgaaggcgccgaaaaagcccgtgcccattgcaagtgccagcgtatcgctgatctgataacgaaccacgatgtaacgcattaaaaaaggaagacaaaacgccccgattaaattcacacacaaagtgccatacggaaaccctgctgcttggtgcaatccgagcccaattgcatagcgtaaaatcccgccaaaaaaggcaaaaattccaaccgcgagactttcttttatcttcattttagatcgccccctttttaatatcgtagcatctattttacagaagttattaccaattgtaaattagttgtagatattaactagcgataatgccaactttttaataataatttaatcactaacgaattatcaacaaaatcgataatattagcgccaatatataaaaagccaattttacgaacccgtgctgttgctcggaagctatttggctttgacatgctttagtacccatctagctatcaaagccaacttcctgtgcacagctgtggcccgcaaacagtcggctacaccgcctatttacgaacccgtactgttgctcggaagctattcggctttgacatgctttagtaggttagtgtatgctctacacaactttattgtgcattgaaaggatcttttttatgacaagcttagcgctcgtaatcgttctattggcggctttaatgacgccgttactcatggcaaaatttaagatttcttatttaccaaccgccgttgcggaaattttggtcgggattttactcggacaaagtggcttccacctcatctcaaccacccccacactgacggaactttcatcattgggtgtgaccgtcttaattttcttaagcgggatggaaatcgactttgaactctttaaaaagcaacccaccacagctaaatctggcgttaaaacaccgctgacgcccttacaactggcagtcggtagttttacgctgatcctattaagttcgctaggactcgccagtttattggcatggagtgggttgttcaccgatattggactcgcaacaattctcttttcaaccatcgcgttaggggtcgtcatcgccgcgttgaaagaaaaagaactcctcagccagccgcttggccaaacaattctgttaattgccgtcctcggggaaatcgtcccgctgatttcgttaacaatttatgccgccctcaataatcctggttctaagagtctgtggttactatcactaattttcttagccgcgatcttcttattgatgcgttttaaaactgtttatcacttctttgagcggattgataagtcaacgactcaactcgatattcgtttagcctttttcttaatcatcacacttgtatcgattgccgaagaagtcggtgccgaaagtattttgggcgctttcttagccggcatggtcatgaaacttttacgcccccgtgaagagacgcaagataaattaacatcaatcggctacggctttttcattcccatcttcttcattatgaccggtgcaaaactcaacatccccgcgctcttacgtgatcctaaatcactgaccctgattccctttttcttcatcagtttcatgggcgccaaagttttgatttacttcgtcttaaaacggcgcttcaaagtcaccaacgccctcgccgggactttcctcagttcgacgaccatcacgttggtcttacccattttgacggtcggtctcaacttgaaggttatcacgacacagcaatccggcgctttcacaattgcagcggtgattagctgtattcttggtccgattctgttcaatcgattctacttaccaacgcctgaagagatgccacgcaaacgtgttaacttcatcggcgccaacatcatgacaattccaatcgcccaacagttatccaaaggtctgtacacaagcgaattatttaccaataacgaacaaaattatcaaatctaccatagccaagccaacctcgaactcttgcctgacttggcaccagccaccttaactgacgcggccgtcttcgatacagatatcctggtcttaggctatttaaataatgagcaaaattatcaacttgcccaacaagcgattcaggccaaagtaccgcggatcatcgcccgctttgaatttaagaatatctcggacgatcaatacgatgaacttaaagaacatggcgttgaaatttttaacacttacgaagcaaatatcagtctgttgcgaagtttaatcgagactccatctaccttacaaatcattgataacactgatgccgggctcttcgaagtcacggttaaaaatcggcgcttcaccgggattcaactttctaatctcccatttgtggaccaagtcacaattagtcgaatttaccgcgataagcaactgatcatgccgcatggtgacacgcaaatccatctcaatgatcacctcattctaacggggaataaacaggctgttcctgccattcgacgccaattagaaacgctcaactaaatcatgttgaccctcgcacattctctctaataggtttataatgaaactatcataattaaaggatggtgcagatatgaaacaaggaacaacaatcctcacattggataatggttaccatttatggactaatacgcaaggaacaggcgacattcatttactctgcttacacggtggccctggtggtaatcacgaatactgggaaaacttcggtaaggaattagctgatcttggtgtacaagtacacatgtacgaccaacttggttcattttattctgatcaacctgattactcacaaccaggcaatgaccaattattaacatatgattacttcttagatgaagttgaagaagtccgtcaaaaactgggcatcgacaacttctacttaatcggccaatcatggggtggcgcattggtccaaatgtacgctgctaaatatggccaacacttaaaaggtgccatcatctcgagtatggtcgatgaaattgacgaatatgtcacaaacatcaacaaaattcgtgaagacatcatgacccctgaacaattgaaattcatgcaagactgtgaagctaagaatgattacgacaacgatgaataccaagcacttgttgacaagttaaacgctggttacgttgatcgcaaacaaccacttgcaatctcacatttaatcccaacaatggcaaccgacgtttatggcgtcttccaaggtgataatgaattcgttgtgactgggaaattaaaggattggcatttccgtgaccaactccacaagattactgtcccaacgttaatcacatttggtgaacacgaaaccatgccaatcgcaaccgctaagatcatggctgaaaagattccccatgctcgcttagtgacaacgccaaatggtggtcaccatcacatgattgataacgcacccgtttacttcgatcacttgaagactttcatcaaagacgtagaaaatggcaactttaacgattaaataaaaaaagccgcgcacaaatttaaatttgtgcgcggctttttttgacctaatcaataatatctgaattaggttcccatttatccattgtatcgaataagtggtttgtttgtgcgaataattgagaaaggtctgcattgccgtcatctttaaaatgtttaaagaataagtagaaatcgacttccaattgatcaaccattcgtaatccttgctcattcaatgaaatgaatactttacgttggtccatttcatcactgcgatttttaacaattaagtgttttctgaataaaacattaattttacgtgaaattgctgggcctgaaagatcaaaggattccgataatttcgccacttcaatattggggtttaatttgacctctctgagaatcaaaaattgatcgtatgtcaagtcgtgcgtgacagttaaatgatttatcttattgtaaatttggccaatttgcagataccattcgttgaatcgatcaacaaggttactatccgtttctggttgcatcgaaccactcctttacataaacactaaatgtggttattaagtgttactagtcaaaaataacacaaaatgtataaaattaaaagatttatgcttaaaatattaataaatattgataaagttatttattagtatcttttaaaatttattctctcttaatgataattgcaattgattataaatcaattgttattattaccattaaaaattataaatgtatataaccgttttgcaaaaaatatggaatgaccctgcacaccatttttatctatgctagaatgaaggtactaaaagctattgttggagggttacgatatgaaacgaatcacactttatttagtgcgtcacggtcaaacattctttaaccgttataaccggatgcaaggttggtcagactcaccacttactccgaaagggattgcagatgccgaacgcgctggcaaagaattagcgaaagttaattttgctcaagcttattctagtgaccgcagtcgcgcaatggacaccgctaaaattattctccataagaatttctaccttgatactccatatgctatcacaccgcacttccgcgaagaattctacggctattttgaaggtgaagattcacccaaagcgtggtacatggcaggtgccagtcatgatgccaaaaccttccaagaaatcatcaccaaatactcactcgatgcctctaaagatttcatgagagaagctgatcccttccacgatgctgaagatgccgctgaatattgggcccgcgtcggtaaaggtttcaaacaacttcgtgctgaatgttctgacggtgataaagtcttgatggtcagtcatggcacaaccattcgcagtattgttggcaagtttggtaacgaccaattcgatgttaccgttagtccaatgaacggtagtattactaaagttattttaacagacgaaggcgttactgttgaaagttacaatcaattaacccttcaatagtatcaaaacgataattgatgtatgaatattcattgaatatagagctgggcaatattattctgattgttcagcttttttcgcgggcaataattcatgtcgttcaataataacgcgcgcttcaaatgacagtttcggcagtcttctttggctttttttgtaggtaaaatgctcaccccaattgtagctaagcaagttaaaaactaatccagcgtggtatacgcctcttaataacatcagtgtaacaagtagcgtctagagaaacaacttcgacctcatctaaaaaaagccccctttaatctcgaagttcagattaaagggggcttttttagactgattcctatgttttaaactgtttcaaccatctactatttaacttccttcaacacaattcctttgtagagccatgtagtgagtaagtagtagattgcgtagagaataatgaaaattgaaaatggaatccagagatcattatatggatcaatcataatcaatttgaacaattgaagaccaaagaggacatggatgacgccgacgatgcctggtaagaggaataagaccccaatttctttggcaatggattgttgcaatagattgcgacgcgtcccgattttagccaacattgtgtagcgtttaacatcactagctgccccagataaaatcttgaacatcaagcaacttgctaacatcgctaagaatgcaatcccgaggaagaagcccataaattcgagcccactgaacatgctgttcgctagcttatagttagcatacttgctattatccattgtagccccttgacctttagccaattcaggatttgcaatcacttgttgtgcgtgaatttttttgataacgggtaaattaaccgcaaagtctttgacccgatatgttttaacttgcgtggttgcgcctgccacttgattaaattcagcgtcagagacgactttaacgtccttactagattgacttggcacttgaattgcgcgcaaggatgaagaatcgccgttttgaatctcactgagtttcaccggtttaaccccttttgcgcgggcgacaccattcccattaccaaactgaatggccatgattggtgacttttcaagttgtgctgtccgatagtagacagttttcgcatcttctttaacatcgtaattagcagtcgccttcacaccctttaaatcttttgtgaggcgcaatgcttcttggttcggttgatttaaaacaacgtcgtaaggcgccattgtttctgccatttctggaatttcactttgatagccaatcccaactgtaattgcgcctagtgccgatgcaaataacatcgccaccaatgcgagcatcttggtgtaatccttaatgcggaagctcaattgcgctaacgtaaaattatttaaaccacgattacgaatcttgctgttacgtttgagcaacgtaatcaaccagccgaaaagggcattaaacaagaagtacgtcccgagcacaattgtcactaatgccacaactaagcccataatttggaacgttgcgactttaatcatcatatagtaaccaacagctaagaaaagtaagcccaagacaatttgtacaatacggcttaatttattttgtgaaatgcgatttggttgttgatcatcgtgtaagagttgtaaaactggtgttttcaaaagttggaattgattaactaccgctgcaataatgaacaagataatgaagaaaatcaaagttactaacactgcaggtaagtaaaatggtgaaaaatgcttaatctgaatatccatttgagacaataacagattgctaacaatttgggttaatccgaccccgagcgccgttccactgagagtagcagctgtcccaatcactaatgtttcagcagcaattagttgggcaattttgcggccttttgcgccgagcatcatgaacatcccgtaatcacggcgccgcatgctcattaagaaattattcgcataaataatgtagactaatgtgataatccctaataaaacagacccgatttggaaaataatgcccgccatactaattggcgagttactcgtaacgaaacttttgttagttgccagtgcttcgaacatgtaaaaaatggcacttgccataattagaccggaaaaaagcactaaatagtctttcaaacggcctttaatgccggttaatgataacttcaataacatatttagacttcctcctaatggttaaatgtgcctaatgtatctaaaatttcttgataaaaggcttcccgactcttatcgccgtgaacgagttcttggccgatttgaccatctttaataaacaagattcgttgacaataactagctgaaaatggatcatgcgttaccaataagattgaaacgcgttgttcttcgttcagttgagccattgtatccaataattccttggcactctttgaatcaagcgcacccgttggttcgtctccgaataaaatagctggattatggactaaagcccgcgcagcggcgacccgttgtttttgaccacctgataattcagttgggtatttgtttaataaactatcgattgataacgtcttggcaattgatgtgactaaatcgcggacttttttaccgccaacattttgtaacgtcaatggtaatgccatattttcataggccgttaagttttctaataagttgaagtcttggaacatgaacccaatttccttggcacgaaaatcagctaattcattccctttcaacccattaattgcttgcccgttaatttcaacttggccagcagtcggtttgtcaagggttgataaaatgttcaataaggtggttttccctgaaccagaagcccccatgatcccgacaaattcgccctgtttcacatcaaaagtaacgccttttaaggctgtgtattgtttttcgtttggtttaccgtatgtttttttaacgtctttgacgctaacgactgttggtgtgtccattaataatgcctccagattttatgataattctatcttacaagagattaaaacggcatgcgcgctttttagatgacattttaacgggctaaaataacaattttgtaagattattcccccgttctttaaaaatcaatgtgaaacagtcaaaaaagttttgtcttccctttctgatttgattataataaaaacattgtgaattttcagaaaaggggtttctttacgatggatgaaatagaaccaaaaaagaaatatattacctggcaagtccttgctttaatggattttgtgaccgtcattggatttgacgatattatttataactttcaaaaccaagggatggcagttgtcttctcatggattgtcttactattcgcctatgtcctcccttatgaattaatggttggtcacttaggctctgctttcagtaaagacggtggcggtctttccagttggatgcgccatacaagcggtgatgtttggggttacttaaccgcttggtgttactgggtagcgagtttgccatacttggtcgatgttgctaattcaatggtcgtttccttcttttggattattactgggaacggaaatcttgaagacaagctctcacgggcttcctttgcgcttttaacagccgcaattaccatcctcttcatcttcttccaacacaagtttacatcgtctctacaggtactcagtatcgttggtgggggggcgatgtttgtcatgaccatcctctttgtcctaatgacctttgttggtttattgaacggtggtcacgttgccacccatccattaaacgcacacaccttcattccaaaatttgatttacattacttctcaaccatcggcctcttaattttcgccatgaacggtgccgaacttgttgcaccatacgttggccaaatgaaagatggtaaaaaagattttccaaaagccatgatggccctcgctctaatgaccgccttcctaaccatcttcggctcattagcaatcggcgtcttcttcgatgccaaccacttaccagctgacttgaagatgaacggttcatactacgccttcttagcccttgggcaacaattccacatgggtaaagtcttactctacatcttcgctgttacccaagcgatttacatgggcgctcaattagcgatgctactcgatggcggcacacggattttcttatccgacactgccaaacaattcttaccaaaagcactgactaagaccaataaacaaggccttccaatcaacggttactggttgaccactgggatttgtacctttgttttagcatctagtgcctttctgcccgagattaacgacatcttcaattggttgttaaatattaacggtatcgtctcaccatttgtaacttgtttcatctttgtcgccttcttacgggtccgtttcaatagtgaaaaattcccatcagaatacacatacattaaaaacaaaccatgggccatcatcgttggcttctggtgtttagccattacagcattaggaacgatcttcagtatcttcccacaagatgccacacctggcacagccaaatatacacacgaattaatcttaaacatcgtcgtctcagtcgccttaatgggcctcggcgtgattttaccactggttgcaaaattccaaagaaaacgagcagcctaactaaaaaagattcgccccatatgggcgaatctttttttattgcctgggaaatgttaataaatcataaagccatctggttcaatgatggtcgctgctgtttgctgctgaaccccttcagacagaattggtgtcctcattgatgcaacactaacggctgtttgacctgcattaaaaacagccgtcaattgttgctcacctaatcgccgagtcatttttaagacgtcgggatgagtcggctcaattaaccactcaagctgtccttccgacaatagtttttgcttaccatggcgaagcccaattagctgcttaacgaactgatacatggcttgatcttggtccacgggatcccacaccatgcatttacgattagcaggatcgtccactcccgtcatgccatactcatctccataatagaggcatggcacacccggctgtagatacataaaagccatcgtttgacgcatcaagcgtcgattgtcgttggccatcgttagcaaccgcggcgtatcgtgcgaatctaggatattaaactgcacctgattaatttgatcccggtacagcattaactgtcgattcagcttcgaaaccatttggtggagcggaatttttttatgaataaaataatccaaaatcgcatcagtgtaggcgtaattcatgactgcactaaactcgtcaccgctgagccaactctgcgctgaatgccaaatttcaccaagaatatagaaatcaggtttagcagcatcacacacctgtcggaactttttccaaaagtgatgatcaacttcattggcgacatctaaccgccaagcatcaatatcaaatgcttcaatccaataccgcgctatcgataacaaataagcttgcacctctggattagccgtatttaattttggcatgtgtggcgtcgtggcaaagacatcatatgtaatgtctgtagcatcttcgaaattccgacctggctgataacgcactggaaaatcccgaatatggaaccaatcagcataccttgaagccgcgccattttgaatcacatcttgccattgtggtgattgatcgccgagatggttgaagacagcatctagcatgaccttaatccctctttgatgacaagcagtaatcagctgccgtagcgtctcgtcattgccaaaatgtggatcaaccatccgataatcacgcgtatcatatttatgatttgaaggcgccatgaaaattggattgagatacaatccattaatccctaacgccaccaaatgatctaaatggtcaataaccccttgtaaatcaccgccatagaaatcttgagcctgtggtgcctcatttgtccacggtaatgttccatctggatcatttgtcggatcaccatttgcaaatcgttcaggaaaaacctgataccaaaccgtttgtttgacccactctggtaccttagcccgatcaatttcttggaaatagggcatccgaaaacaagcatctgttttaggtaagattggaccaggcccctgatcaccataaaaagtgctggtcccgtccacaccaatcacttgaaaagcataggctaatcggcggcgatcaatggtcagttcaatcgtccaaaaacaagcgagatccgttattaagccttgctgcatccgaatcgttttcggttgccaactgccatcgactaatatataaggatccccatacactaggtacactgcttcaacgtcattacttgccgtccgcaatcgtacccgtagcctatctggctgatataagaaagcaaactcactatctggtcgatgataaatcgctgctaaatccatttgtctcctccttaaaaaaaccagtccaacacacacccgaaggctcggttgcactgattaattagtgttgatactgttcaaaggcttgttctaacaaatcagccgttaacgccgccgttgtagggacaacaaccgccgctgctgataattcgctcgcatgaccaatcgcaaccgaaacagcgcctgcagcattaatggcggccacaccagctactgaatcttctaatccaacgcattttcgcggattaacagcaatcttctgagcagctgcgatgaagatatccggggctggtttaccttggtgcacgtcattcggattaacaatcgctgtaaaatatgctgataaagctaatcgatcaagaatgagtggcgcatttttgctagcagaagcaatgaccattggcaccccgcgcgcttttaatgctactaacaacggttgaatacccggtaaaatatcggcagccgttaattgcttgatagcagccacgtaattttcatttttttgagtcgccagtgctgcgagttgtgccaccgtatactggccatcaagttgggcaaaggccacaattcgttgcaaggatgcttcccgactaatcccttttaactcagcttcaaagctatctggtaagctgacgccaaacgcttgttgcgccaattgacgccacgccgcaaaatgaaatcgggctgtatccgtaataaccccatctaaatcgaataagacaccgtccataataacctcctattccaacatcatcgacgcatcattgacttgaattgccaaacgatcgcccttgagtagtttgatatcagttcggtcggccgtcacgctaattttcaacaaccggccgcggaagttaatatggaattcataagccgtccattttttgggtagaaatggtttgaatgataattgtccttcatcgctaattcgcatgcctgcaaaaccttgcacaatcgctaaccaactccccgtcatcgacgtaatgtgcaatccgtcatcggtatcattattgtaattatcgagatccaggcgtgccgtccgcgcgtacatttccaccgctttatcttcgtaatgcagatcagccgctagaatcgcatggaccgccgctgataaacttgattcatgaaccgtcaacggttcatagaaatcaaaattacgcttcttttcagcagctgaaaaacgatccataaaataccaaatgccttgtagaacatcggcttgtttaatgtacggcgaacgcaaaatcttatcccatgaccaatgttggttgatgggccgttgatctgctgggattgcactgacaggctggatatctttatctaaaaagccatcttgttgaagaaagatcccgagttgttcatcttgtggcaggtacattttttcaataatcgcttgccattgtgagagttctgcatctgaaagtctcagatccgcttttttgttatcgcttacttttttgagcgtttcaatcgtataactaagcgtccattgcgccaataaattcgtataccagttattgttaatattgttttcatattcattaggccctgtcacaccgtggatcatataccgctgcgcacgttgtgagaaatggacacggtctgcccaaaagcgtgcaatctcagttaacacttcgataccttcattgagcaaataagtctcatcgccggtgtaacgtgtgtagttataaattgcataggcgattgtgccattgcgatggatttcttcaaatgtaatttcccattcattatggttctcaatcccatcaaaggtcaccattggatagagcgcgccttttaacccctgttgccgggcattgtgttctgcacccgacaattgattatgccgatacttcaatagattcaacgacactttcggatcagccaatgagagataaagcggcattgcaaaaccttccgtgtcccagtaagttgcaccaccgtatttttcgccagtgaatcctttaggaccgatatttagacgctcatcttcaccataaaaggttgaaaaaagttgaaataaattaaagcgaatcccctgttgggcactatcatcaccggcaatcaccacgtccgccatctgccaccgtttcgcccattgattcgtctgtgccgctaataattgctggtaactttgttgcgcaacgacctgcttgatacgttgcatatttggtaccaagtccaactctgaataatctcgagaagtcaccactaccgctcgtttttcaaaattcaattgcgttttaggggccaattgctgtttaaaacgttgcccaacttggtgggcttcttgaagcccagtatctgccatcattgtcgtttgatgatcaatttgaacccccacactaaaccgtggtaccccgaaatcgttgggcattgtttttccgaccaaataagtgtcatccgcagcgtctgactgctcaatcacttgccagaattgctcaccgtaattcgcatcctcattttgaacatcagcatcgatcatagaactaatctcaatctcaactgcttcgctcgccaagttttcaacagtgtagcgcaatgcgcataattccttttgaacgatactaacaaaccgctctatcgtaacttgcacttgtttattatttttagtaacgatgaattggcgggttaacaccccattatgcatgtcgagtgccaacttaaatgcggtcacttcatctttgcctaaatccaccgcttgaccatcaattttaagattcgttttgatgaaattgatggcattgatcactttcccaaaatagtcaggataaccatttttccaccagccaacgacggttttatccggataccagacgccaccgagataaatgccaggcaggctgtctcctgaataatcctcttcgaatacgccgcgcatccccatgtaaccattaccgatactcgtcatactctcttgtagccgtttatgtttacgatctagttgatgcgtgacaatctgccacggatcgacttcaaaaattctctccatttcgttccctccgatacgtcagccaaaatcattccgcctatttagcagcgcttaatagattgtttcttccgttgcaatgtcgaagtagtgtgctttagacatttcaagcaccatctcaacccgatcaccaggttcatgataatcccgcgaattaacttcagcgataaaatcggtttgtccaatctttgagtagagcattgtgttagcccctaataactcggaaacgacaacctctgccgttattttagcatctgggaatgtttggagggtaatttcttcagcgtgaatatcttccggccgaatccccaagatcacttgttgaccatcgtagccaccggcaataagctgtttcaactgaccttctggcactgcgatatttagaccatcgtcattcactagatgcccattagttaaggttaccgtgaagaaattcgttgctggtgaaccgataaagcctgccacaaacttattaaccggatgattatagagttcagttggcttgccgacttgctggattttaccatcgttcatgatgacaatccgatcagccatcgtcatcgcttcaacttgatcatgcgtcacatagatgaaattacgacctaagcgttgatgtaattgcgcaatttcagtccgcatttgcacccgtaacttggcatccaagttcgataatggttcatccaataagaacaacttagcatcacgaacaattgctcgtcctaaagctactcgttgccgttgcccaccagaaagagaagatggcttccgatctaaatactccgataaacctaagatttctgctgcggcatcaacccgttttttggtatcttgcttatcattcttacgaatattaaggccaaacgccatgttatcgaagactgtcatatggggatagagcgcatagttttggaaaaccatcgagatatctcgatccttaggtgcaaccttgttcatcactcggtcgcccattttaaattccccatcagagatatcttctaaacctgcaatcattcgtaaagttgtcgatttaccacagcctgatggcccaacaaatacgatgaattcaccgtctgcaattttcaaattgaaatctgtgacagaattggtatcatttcctgaatattttttattgatatgatttaaattaatttcgaccatcgatcatttctcccttacttcgtttttaactggtgcaccgttcaataattgatagctaatgaaggctgccaacgaaacgctcgcaacaagaatcataaacgcgagttttaaaaagacattaatgcccatcaacaagatgaaaacgccggtggctagcactaatttgcccccattggcaatgataaagccgcctaaggtaacatcatggcgcgctaacccgaccaagtagcttctggcaacgacaactagcaataacgccccaaaccagaccaataagccgctacgaactaaaatatcgcctacactggcttttagtaacaacacgatgatcatcaatgccgtcgctaacgtcagattcactaaaaagtctggcagtgcctgccgccacccttttaacacaacgcgtgcataattaccatcaccgttaacttgccattggtctaccgctctaaaaaccgcgactaaacttggtagtgtaaacaaactgagcattaacactagcacaactgcaccgggaatcattactcggccgtttggcatactaaacgttaaaatcagtgtcagaatgacaggaaaattaattccaaaccaagcaaggttgatggtaaaaagcgaccataaccaattcccggctgccaataacgtttgtcttgtttcgctgtgctttttcacgatcaacacttccttaattatttaacggcgccatctgtaacacctttgataatccatttttgagcgaataagtagaagacaatgaccggaataatcgacaaggtaatgccggctaatgcgaggtgccattgtttcgtgtattctccgaagaaattaaacatttgtagtggaatcgtatattgcgcttgtggtaagaccaatgatggtaaaagataatcgttccagatcgcaatgatgttcaaaatagcgaccgtcacagtcattggactcaacattggtaagatgatcttgtaataaatttgccaccgactggcaccttccatttcagccgcctcatccattgcaatcggaatacttgaaagggtgccttgatataggaaaatcgataaactacagttgaagcctaaatacatgaacatcaagccgtacatattcaacagatgcacattaccgaagtttgccgtcaacggaatcataactgattggaatggaatcaacatcgctgagatgaaaagcagcaataaactgctactcaacttcgatttattccgttgcagtgcataggctgccattgaagaacataggataatcagcaacacactgcagactgtaataatgagcgaattggtcaatgaactaatgaaattcaatgctttaaacgaatttccatagttcacattcgtgaatggattaggcagcgacaatactgaggcaaaaatgccttttggtgttttaaatgagttcgttagaatcatatagaatgggaataaccataaaagaccaatcaatacaccgaggacgccgatccaactatttcttttcttattcattagaaatcgccctcccgtttacggttataaaagacttgtactaaagaaatcgcagcgacaatcaagaagaagaccattgctttagcttcagcgagtgcgaaatcactcgaattataggctgtattcacaatatccatcgccaacatttgggtcgagttgtaaggtcccccgttggtcaacgacaagttttgatcgtagattttaaacccattcgacagagttaaaaacatacagacggtaaatgctggcgcgatcattgggaatgtaatccgcgtaaatcgttgccaagcagatgcaccatcaatttcagcagcttcaatcacttcacttggaatattttgcaagtaagcaatatagataatcatgatgtaaccactcatttgccaaaccgtcacaattaccaagccccaaaaaccagttagtgaattcgttaaccagttttggaaggcagtcatgtgtaaggcagatcccaaagcgctaaagccttgcgtgaaaatgaattgccagataaatcctaagattaacccaccaatcatgtttggcataaagaagatcgctcgtaagaaattgttgcctttaaatttctgtgtcacaagtaatgctaaccccaagccaattacatttagcaagatgacggtcacgataacaaaagctaccgtgaaccaaaaggcgtttccgaatgctttatcttgtaataaggccatgtagtttttaaacccaacgaccttagtaaaagagagtccatcccagtcagtgaatgaatagaataggccctccagcattggaatgaaaacgactaatgctaatgcaacaagggtaggggttaaaaataaccaaaatgataaactcttatttttcatttcaataccctctttttgttttatccaattgaataaatttatttagtttgttgttttgtccaaccgtccttcatatttgaaacagtcttttgccaatcttggtcacctgatagatatttttgtaggttaggttgggcaacgtctggatcccatgatgtgccagtataacccgggaaaacccagccgaatgttgctttcttttgactgtaatcatagaccgattgtgtgagtgcatctggcatcttcacatcaccgtaacctttataagcaggtacgaaatgtaatttctcaacaacgtcttttttaccttctttagacgtatatagccagttcaagaagtccttagctgctttttgttcgtcggtactcttccgtttattaactgcccagtagattgaggtcccaacaggcatcttaccttgttgttccttaactggcattggaatcatgccgatcccgtcttgagcgaatttcgcatcaatttggttaacggtttcgtaaatccagtcgccttgttgaatcatcgcaacttttccttgagcaaagttttggttcacttgtcccgcgtaatccatttgcatgactggttgaacggaatattctttttgcaaatcaatcatttgtttcatttctgcattgttttcaaacttcattttctttgaggtatacaatttttgtgcattgccatcaaattctttacttagataaacattcaacaaatgatctgaaagaatccatgattccttaccaggtaaagcaaagacccctttaatgcctaattgttctttttgttcatttaatgttttaacagctgcttctaatttatcgtaagtcgttaagctctttggatcgataccggctttttcgaagacagctttattataaacaaaaccatagccttcaatgttaaatggcaagccgtaaactttcccttgtgacttaacagtatctagtgtgcttggaatagcggccttagcagcttttgtatccgttaaatcagccgtgtagttcttgaattgtttaaccgatgctggcccatctaaactaaaaatagtaggtgcattcccggatgaaattctcgtcttcaaaacgggattatactgtgtcccaccaccgattgatgtgatttcaatcttgacgtttggatgtgctttttcatacttcttcgcaatcgctttgaattgcttgttggattccacttttccttgtaggattgtgattttcacattgccgccatccgcactcttgctcccacaagcagccaatgttaacgttacaccagccaataacgaaactaaccctagctttttccacatctttttcactataacgacctccaataaatttttatcagtgctgtttacaagttttattgtcgtactttgaaaacgcttttacaaatgttttcctgatgttaccggtaacagttttcttatgcttattccgattgttcttttagcacagggcgaattgtcccgcccatttcaatgtgtggttcgaatatcaatggtcgctcaatccactcctgattaattttcttgaggatattctctccgcatgcacggcccatttcaatgatggactgcttaatcgttgtcaacttaggagaggcaacttgatttaaaaagaccccatcaaatcctgtaatcccaaactcttgcggcacatgaccaccacacgacgcaatcccccgttcaatcccaattgccagacgatccgtggcacaaataaacgcagtctcgagtttgaattgcgcccagtgttcaatgatgtaggcttcggtcaaatgactatggttgttaaaatggtgtaactgaacaggacgctgctgctcatgcattaattgtaaataaccggcttcacgtgatttttcaaacgcttcttcactcgccattccaatataaataagctggcgataaccacgctctaatgctaattgcgctgcaaggtaggtccccaactggttatttgtatccacataatcaaaaccgtactgattctccccaaaaacgacgactggctttgtcagatcgcgaatccatgcaacatccctttcacgcaatcccgtaataatgtagccatcacaattcccgatatcaaagttacgccgagttactaactgcagcgaatactgatgtaggtcaagtgccttagcaattccgaccattagattcatgtaatatggttcggtaacgtcgatgtcttccaagatacacaatttgatgattcgggtactgttgctgactagggctttggcaattaaattgggacggtaatccaattccttcattgcggcatacaccaattccttcaattcatctgttacttgttccggatgattaatcacccgcgaaactgtcatcttagaaacgtttgcccgcttagcgacgtccattaatgttgccatttctccaccccttaagttcaactttttatattctttcacaattataccaatttatgcataaaatgattacgatttaccttattggtattaaaaaaggccatcatctaaagatgatggcctttcccttttttattctataattgtttgatttatctgccgtaagtactccaagtccgttgctttgatgccagtatgcttagtaatatctttttttagcgctttgtacttgcggaggccttcttcagttgcttctaaccaaacattccgttggtcattttccatatcacgaattttgcgaataaactttttactttgtagcgtattgattttacgggaagccgctggtgcggaggtcccaaatacgactgcaatttggcctggggtgttccgtcctagttccacaatctgttccaacacgagaaattgatcataacttaagccatgtttttcgctcattttattcaattgagtcgtgatgttctgacactccagataccactcactaattgttaatattcttttattatctggcatctgcaaccctccaccgtccattcaatatagttttaacttatgtacaataaatgaccaccggctagtcaaaagccgacaatcatttatttaaaacaaactagcgactcatttcaacttgattaagcagcagttaaggttagtttatatcattgtttggttatgtgcaagtatatttcacgcgacaataattgtcaatcgttcattaaaaaccttttaaaaccaatgtttgagcgatgtttttcggattattttaatttgtagataaatttacgcattttctgaaaacgccaataagaacctttgatgcgaaggggtcacaactcatgagttatgacctagtttatttttataaaaatcaacaattaatgccgataattcatttgcgcaactattttatttttcgtctatccgttgctacaattggtttttggccacaaaaaaaacgaagttcagttaattcacgaacttcgttttttgtgttaaacgactggatatttattttttaaatagtaataaaagggcaatccgagtaatgtaattccgattccgattaaagttaacatcgtctgtgtgaataatgtattcaccacgatgaaaatcccaccaagaatggcgatgactggaatcactggataaccaagtgtgcgatacggacggtttaattctggttcacgtttgcgcagaatgaacacagcgataaacgttagaatatagaaaatccagatgacaacaactaacatatcagtcaatgtattgaagccacccatgaacatcataacgatggcgatactaatttgaactaaaccactgacaaccggcgcgcctgttttagaaagggagcgcagttgtcgactgaatggtaaccgattctcgagcgccatcgcataaggaatccgcatcccagtcatcgtgtagccgttaatcccgccatagacggaaattaaaatcccaatagtgatgattttaccacccacaccaccaaatagcactcgagccacttctgaagccgcattcggattgccggcaatctgattgattggcaacacaagaacgaagacggcgctcactaagaggtagacaaccatggttcctgttaaaccaattaaaattgaccgcggcaaatcgcgttccggatgcttcaattcacccgcaatattcccaacgtgaatccagccatcatacgcaaagagggttgctagaacaccactgcccagcgctgacaggaaactccccgagccatttgaccgggtcacgtcaaataatgacacatgaacggcgttgctgcctggatgaattaacccgaatacaataataatcgcaagcgggattaatttaaagacggttgtgaaggattggaatagtcccccaacccgggaaccaaagaaattcaagattgttaagctgagtccgacgatgattgcaattggaatctgccagtgagctgaccaactgaataagttaatgcattgcgttgcaaaaacaatcgacaacgccgcaatgttcgctggaaagtagactgttgtttcggcccaacctaataaaaatgccgctaaactaccataagtatggtcgatgtaccgcatcatcccgccagtttctggaatcgcagctgctaattcaacagctgtcaatccagcacaaattgtgattaagccgccgacaagccatgcaagcattgtcagcccggtggagccggtcgcatgcgtcacaggatccgctttaaagaacacaccagcaccgatgaccgttcccatcacagtggctaatgccgcggtaaatccaatcgtttgatttaatgcttgtttttccgtgggcatcttaaccgcctcctaatatcatttataatatttattatgacatgttgaaagcggtctttactagtctaatttgcaactaaattcggatatgtgcggcggaaatcttccattgcaccaatcaagttcgcatcattatgatactgacacgtccgaatggttggcatgaaaggcgcaatatcgacttgcttgagtatttcctgtaaagctttttcaatatttggcaccaagaaatcggcctgcgacaccccaccacctaaaataaccgcttctgaatcaaaactatattgtaaattatagatggcttgtgcgagattatcatagagcacctgtgcctccttttgcgcgagtaaatcgccttgatcagccaattcaaaaacttcacgccctgagtagttagtatgtgcctcttgattataacggtcagccatgtgaacggcggtcccgacttcacttaaaatccgaccatcattcatcatcatgtagccaaactcaccaccgaataaatggcgaccatgttggacttgtccgttgacaatcactgaaccaccaacgccagtgccaattaccatgaacaacacattttttagccctttagcagccccactaccgacttcggctaaagccgcgcaattcgcatcattttccattacgactggtaagtcaaagcgcgtttcaagttcatcttgaatttcaaaatgatgaatataagggagcgcactggccccttcaataatacccgtcgccttgttcactgcacccggcgtactcattgcgaccccaacaacttggtcactagccttaaactccgccacaatctgcgtcagcacatcataatacgcattcaacgactttggtgtggcaacagccccttgtttggtcaattgttgcgccgcaccatcccataaaccatatttaatcgtagtgccaccaacatcaagtaatgctaaatttttcattcgtcaatcccccaatcgattctcttatgtattttgataaccgcttacattctaccataaaattacgctgggcacccacaacagtgttaattattggcgtacacgctaaaggcgaactttggtttttaatggctttcatggtacacttaacggataaggtgggtaaccacccatttcacatcaaaggagcgtcaacaacatgtcaactaacgtttgtttaatcgcaatcacaattgaataatcatgtggccattttgcggctatttctgttggcattcgctttttaaatttaattaactgagggctgtgacaaaagaatatttttgccatggccctttttttcaattgaaacgtgctccaccaggcatctgctctcggttagctacgtcagccaaataaccaacaaatcggtttttcgtctgcctatgctaatcctcagcagataaccgccggtgccgcactcttatcttaaacgtgctttcttcaaatagccgtctgcgtttagcgccatctcgtaaacaatcggcgttgccgctcatttacgagatattgctaatcctcaacggctgaccatttgaagacgcactctcacaaaaaggagatctcatggaagaaacttatatgcaacctaaaaaggttttaatcactggtgttagtcaacgccaagttaattttgactatacaatgcgcgaactgggcgaactagcccgtgccgataacttagaagtcgttggtgacgttcgccaaaatatcgaccaagctaatcacgccacttattttggtaaagggaaggttcaagaaattaaagaacgcgccgtcgctgaagatgcggacattatcttgattaacgatgaactttcaccttcacagattcggaatttagaaaaagaactcggaataagcattcttgatcggacgcaattaattcttgaaatctttgctagccgtgccaaaacaaaagaagcgcaactccaagtggccatcgccgaagcgaaataccaattaccacgcctccatccttctgaaaacaagttggatcaacaaggtggcgggggtactgcgaaccgtggggcgggtgaaacccaacttgaattggatcgccgactcatcgaaaaacggattacgaagctcaaagccgaacttgctaaaatcgatcaacaacaactcgtacaacgccgtcaacggacgaaaaatgcgattccagttgtcgcactcgtcgggtacaccaatgcaggtaaatcaacgactatgaatcgaattttacaacggttgaaccccgatacacctgaaaaacaagtttttgaaaaggatatgctctttgccaccttagacacgagtgtccgcgaaatcgtcctccccaaccaacagaaattcctgttgagtgatacggttggtttcgtcacaaaacttcctcatcacttaattcaagcctttaaatcaaccttagctgaagcagcgagtgctgatcttttaatccacgtggttgattactcagatccaaactacttggacatgatggaaacgacacaagaaacccttgaatcactcaacattaaagatatcccagtcatcgaggcttacaataaagctgatttgaaaccagatacgcgctatcctgaagtagacggaaaccaaatcgtttattcagctcgcgacgaagtagcaatcgatgcattgattgccttaattaacaaacaactctttgaacaatacccaacgctcgacttcttagtcccatacacagaagggcaagctgtttcgtacctcagtgatcgtgccaatatcactaaacaaagctatgaagaagatggcacgttgattcgtgcacaaatcaacccagacctattaggacccgttaaaaagtttgttcaagcatagccaagcgctactttgcggcaaacaaaaaagcccatcgacataaatgtcgatgggcttttttcaatttcttattgatactttctgaaaaacttatctgaagctgcttttaagctttgaatttcttttgaatcaatattcattgttagctgtgtagactcttgagcataagccgctgcaatctcttgcaaaccaactaatgctttccgactgagcgtcacatagctttgtggaatctcattatcctgaacgaataataataaacctgcagcttttaaacggtcgatatcattttctgaaaccccgattgaatgaagggtttccaaatctgcgcgttaatcatcggctagttgcttaattcgttgtaatagcgcggcttcatcaagattaaactcaactttttcgcaaatcatatctagcgtttcaaaatattgcatgctagcaacactagcgtgcaatgtattgataatttcatcgactgttttttctggttttaaataataaatcgtcattttattgtacccactatttttattaggattaaaacacttacttgattgccttaattctataacatttgtggatgaataaaatgcgtatattttaaatagtttaaaaatccggcgaaagataaattaaaaattttatatttgacgaaggtcaaggcaactggttttgaagtaccaacctggcaagtggcattacaaaaatttatggcaaaaattgattaggatgagatgatgagtaataatctggataaaacggtgacgattagtattgtgacctataatagtcaatacgtctttaagacgttagatagtatcaaggcaactgtcttggggcaatacccggtaaaagtattggttcatgataatgggtcaacacctgagtatttggcgcaattaaaagcctatgctgcagatgatgttgaaatcattgaaggccaagagaatcttgggttcggtcatgggcataatgccaacctgaagctgacggcatccgattattttctgatttgcaatccggatattattttaaatcaaaacgcatttgaacagatgtatcggattttagcggatcaagatgctaatgatagcttagggatgctaacgccgaagattgttggtccggatggtacgacccaacatttagtacggcggaagctagatgtcttcgattatatgctgcgctttgtaccttttaaatgggttaagaagctatttgaaaaacgcttggcggcttatgaatgccgggatttaacggatcgacggcaagtgattcaatatggatctggtgcgttcatgtttacgcggactgatgtgattcgggctattgatggtttcgatgaacgcttctttatgtatttcgaagataatgacctttgtgatcgaattaaccaaagcggtcatacgattttatatgtaccagacgcggttgtcactcatttttatggaatggcatcccaccgcagtttcaagggatttaagatcttcttgaagtccatggcacagtattttaataaatggggttggcgtttcttctagtctcaaacaaaaaagacggttttctaccgtcttttttgtatgcctcttttattttatgatatagttatactaaatatatctctaattaggagcttaacatgccaaacttataccctgatgacagtcttttgttgcatacagacttgtatcagctgaatatgatgcttacttactttaaaaaggacttgcacaatcgcacagcagtttttgaatgttatttcagaaaattaccattcgaaaatggttacgcaatttttgctggtttagaacacatcgtgaattatctagaaaacttacacttcaccgaaagtgacatcgcttatctacgtgatgaggtggggtatccagctgattttcttgattatttagccaatcttgattttgatttaacaattcgttcagcagttgagggcgaattggtttttgggaatgaaccgattttacaaatcgaaggaccattggcgcaatgtcagttaattgaaacggccttgttaaacatcatcaattatcaaacactaatcgctacgaaagctgcacggattaagtccgttgtcggcaaggatcctgttttggaattcgggacgcgccgtgcccaagaaatggacgctgccttatggggcactcgagccgcttatatcggcggttttgacgctacaagtaacgtacgcgcttcaaagatttttgggattccagccagtgggacgcatgcgcattcactcgtacaagtctatcgcaatgattatgaagcattccgcgcttatgctgaaacgcatcacgattgtgttttcttggtggatacgtatgacaccctcaaaagtggtgtgccaagtgcgattcgggtcgctcaggaatttggtagtaagattaacttccaaggggtgcggattgatagtggcgacatggcctatatttcaaaacgcgtgcgccaacaattggacgaagccggttttaccgatgctaaagtttacgcttcaaatgatttagatgaaaagaccatccaaaacttgaagatgcaagaagccaaaattgacgtttggggtgtcggcacgaaattgattacggcttatgatcaacccgcgctaggggctgtctataagcttgtttcgattgaaaacggcgacggaaagatggtcgataccatcaagctttcaagtaatgttgagaaagtttccacaccagggcgcaagcaagtttggcgaatcactaaaaaagttgatggtaaatctgaaggggattacattacgctttgggatgaagatccactggaacaagattcaatttatatgttccacccaaattacacgtacattaataaaactgtgacggactttaatgcgcggccaattctacggacgatttttgaacacgggcaacgcgtttacaaattacccgaacttggcgcgattaagaagttctgtagtgaaaatctcgactcgttatgggatgaatacaagcgggacttgaacccgcaagattacccagttgacctttcacaacgcacatgggatcacaaaatggcccaaatcagaagagtcaaagaagaagtccaaaatcagagtggttcattcaacggttagcttttgagtatagtgaagtctggtgaataagtgcgctagcgcttatttgccggacaaagctgttgaaggaagcgcgtttcaaaaaagttagcaatctaacatttaaaaaaggtggtatttaatcatgagacctttacaagctgaaattatcgcagccttaaagacccaacctacaatcgatccgaaagcggaaattcgacggtcagttgattttctaaaagattatttaaaaaagaatacatttttaaaaacatacgtcctcgggatttctggtggccaagattcaacattagtcggtgctttagctgaacaagcggtccgtgagatgcgtgctgaaacgggtgatgaaacctatcaattcatcgctgttcgattaccatatggtgaacaggcagacgaatcggatgcaatggctgccattgatttcatgcaagcggatcaggtccggcgtgtgaatatcaaagcgtcagtggatgcaatggttcaagcactggcggaaacagaagtgacagtcagtgattttaataaaggtaatatcaaggcacgtgtgcggatgattgcgcaatacggtatcgctggtgaaatgaagggtgcggttttaggcacggatcattctgctgaatcaattaccggtttctatacgaagttcggtgatggtggtgctgatctcgtaccgattttcagattagataagcgtcaaggcaaagcgatgctggcggaattaaaggcaccaaaacacctttacgaaaagattccaaccgccgatcttgaagaagaccgcccagcattgccagatgaattagcactcggtgtcacttatgatcaaattgatgattatttagagggtcgtgaagtggcagaagaggctgctaccaagattgaaaagtggtaccaaaagacagcgcacaagcggcatttaccaattactgtttttgatacattttggcgttaatcggctggatttcgtttagccgctaaattaattggacgtcagaataatgttttacttgcgttttagattggttctgtcttataattagtttaacgataagggagtaactggcagcttgtctgcgataacgccaccaacaaggcaatattctggtgttatcttaattagtgagacttatgggggattctttgaattctctataggtctctttttttaccccgaaatctatctataggaggcacgacaatgacagatcaaccaagttcattctttacccaatcaacggatgagactttaaaaagtttagccacaacaactgatgggctaacgcaagaccaagttgctgaacgactcgctaaatacgggcgtaatcagttgactgagactaaacgaaaaagcttgttcgttcgttttttagaacagttcaaagatttcatgattatcgtcttattagtagcggcaatgattgccggctttttagcacatgaatggccagatgcgattattattctcgccgttgttatcttgaatgccgtttttggtgttttccaagaagccaaagcggaacaagcaattgatgctttaaaagagatggcaaccccggacgcacatgtacgccgtaacgggcagattgttaaaatcaagagtgaagaactggttgtcggtgatatcgtgctattagaagcgggcgatatcgtcccagctgatttacgcttgttagaatcagcggctttgaagattgaggaatcggctttgacgggtgaatcggtaccggtcgataagactgttgcaacgttaaccgatcctgaaagtgggattggcgatcggaccaacatggcattcatgaatagtaatgtgacttacggtcgtggtgtcggggttgtgacgggcactgggatgcaaactgaagttggtaaaattgctgggatgttaaatcaagctggtgaaaccacaacaccattgcaaatgaatttaagtcaacttggtaagagtttaacgattatgattttaatcattgcggctgttgtatttgtggtcggctacttacgccacgcgcaatcaccaattaatatgttattaacctcaatctcattagcggttgccgcaattccagaaggattaccggcaattgtgacggttattttagcccttgggacacagaaaatggttaaacgaaatgcgttggtacggaagttacctgctgtggaaacactggggagtaccgacattattgcgtccgataaaactgggacgttaacgatgaatcaaatgacggtagaaaagatttttaccaataatcagttgcaagaagcatcagccgacttggcaggcgatgatttagcgttaagcattatgaaccttgccaacgatacgaaaatcacagaggatggccagttaattggtgatccaacggaaacggctttaattgcttatgggcgtgataaaggtttcgtgatccaagatgccctagcagcagcaccacgcgtgggtgaagtaccgtttgattcagaacggaagctgatgacaacgattcatcaagccaaagatggtcaattattaatgaccactaagggtgcaccggatgaattactcaaacgcgtgagtcattttattgatgccaatggcgatgttcaaccgttagatgaagatgaacggcaatttttactcaaaacaaaccacgatttagctaaacaagcgttacgtgtcttggcattagcgtataaaccgttagatagcttaccagcaacaattgatccgacgattgaagatgagttaatctttgctggtttagtcgggatgattgatccagaacgaccagaagccaaacaagctgtaactgatgcgcattcagcagggattcggacgttaatgattaccggtgatcaccgggatactgcagaagccatcgcccttcgtttagggattattacacctgaacaagatgcggatgcggccgttgtgacaggtgccgaactggatcaaatggatgacgagacatttgctaaaaaagtcagtcagtacgcagtttatgcgcgagttgcgccagaacataaggtgcggattgttagagcttggcaaaaacatggtaaagtcgttgcgatgaccggggatggtgtcaatgatgcgccagccttgaagtccgcagatatcgggattgggatggggattaccgggacagaagtatcaaaaggcgccagtgatatggtgcttgccgatgataacttctcaacgattgtcgtggctgttaaagaaggtcgtaaagtctttgccaacattcaaaaatcaattcaatatttattgtcagctaacctaggtgaagtccttaccttattcatgatgacgattttaggctggcaaattctgcaaccggtgcacatcttatggattaacttagtgacggatacattcccagcgattgcgttgggggttgagcccactgaaccggggattatgaatcaaaaaccacgtgggcgcaagtcaaacttcttctccggcggtgtcttccaagcgattatctatcaaggtctcttagaaggtgggattacgcttggtgtgtatgccttagcgattacgtacccagtgcatcaagcgagcggcttagcacatgctgatgcgttaacgatggcctatgcaacgttagggatgattcaactcttccacgcgtttaacgtgaagtcagtacaccaatcaatctttacagttggctttttcaagaataaagctttcaactgggctgtcttagcttcattcctcctgttagccgcaacgattatggtacctggcttaaacggcctattccacgtgtcacatctcgatattcaccaatggggaattgtcctagcagcctcattctcattgattgtgattgtggaaattgtgaagttcttccagcggagaatggctaaataatttgttgccaaccttgtaaagtgcttgtcaattaaactataataaaggtgattaaataacttttatgttagtgagttttgtagggaggattacgtatgcaaatattcttacagtttctgatatcacttttcatctttggtggtctggaacggattactcacgttcaaaataattggttgttgagtttcttactttatttagttattttcgcttgtatcgacttattgacaaagttaatgtttggtcagtcgtggacgagtagaatgttgaagagaagataggtaataatcgacgctagtgacaaacgagattttgtcgctagcgtttttttaatgaggtaaatgtcctttgatgaactaagcatgccttttctattaatgacacatgctttaatattttaattgcaagccgattgggaaattagtatactaaaccataggaaactaggaggatggacatgaataaaacgcaacaaaagcttgccaaatacggccaagctgtcaacgatttaatcgataatactgaaaaagtacaagaagggatgagtaagtatttcacccctttaaaagcagccgttgctgatggtaagttagccgaaatgagcgaacaagactatcaaaagacagcacaaatcttcagagatggtgttgatcaatatcacgaattcttagcacaattcaaaacagttgttgcgcccgctcgtttgatggggaacaaccaacgtttaatcggtgcttacgctgatttcattcaaggctgtgaagatttaattacaagcatgcatgatgatcaaaccgttgatatgcaagcttttgcagcttcagaaatgaatcaagacaaagcaacggaacggatttctaaatacatccaaaatatttcaagaatcgcttagggcgaaagttgacagttcccaagtcgggggctgtttttttaattgaagcaaaaggagtgcaatcagatgcctgatattcaaaatcttgtgattcaacaattaacacagtatcgaccacaacaaatcaaagcaacgttaggtcttttagaagaaggcaataccgtaccgtttgttgcgcggtatcgaaaagaacgaacgggaagcctcgatgaagttcaaattcgtgaaattgaaagcacatttcaatacttaacgacgctcgaaaaacgtaaaaccgatattttgaaaaatatcgctgaacaagaaaaattaacgccaaaactcaaacaacaaattgaaacggcaacgcaactgcaagctttagaggatctgtacttaccctataaacaaaaacgacggaccaaagcaaccatcgctaaagaagccggcttggaaccttttgcgcagtttatcgcagggttacctagcttaaccgaacaagcattattggcaaaagctgaagcttacctcaatccagatcaaaaaatcaatgatacagctgctgttttagctggtgttcatgaaatcttggcggaaaatattagtgaaacagcaaaatatcggaattgggtgcgccaatatacttggcaaaatggtcagttggccagtcaagttaaagacgaagcagccgatgagaagcaagtttatcaaatctattatgatttcactgccgatttaacgaaggtagcggaacatcaatatttagcgattaatcgtggtgaaaacgaaggtattttgaaagctaaaattatgattgacgatcaagtaattgccagtcggatcagccaagatctgttgtatggacaagattcagcgtcagcaatggtcatcaagtctgcggttgaagatgcctataagcggtttattggaccggcaattgagcgtgaattacgcaagcaattaaaggagaaagctgatcaacaagcgattagtgtctttggtgataacttgaagcatctcttgttgcaaccaccattgaagggtaaagttgtattaggctttgatcccgcttatcggactgggtgtaaattagccgttgtcgatggcactggaaaattcttggataagttagtcatttacccacacaaaccagcttcagctgacaaacgatcaaaagcggcggatgaattcactgctttactcgagaaatatcaagttgaaatgattgcaatcggtaatgggactgcgagtcgtgaatcagaagaattcgtagcgacgtgtttgaaatctatttcccgggaaattttctatgtgattgtcaatgaagcgggggcttctgtttattctgcgagtgatgcagcacgggcagaatttccagatttacacgttgaagaacgaagtgcgattagtattgcccgtcgtttgcaagatccgttagctgaattgatcaagattgatccacaagcagtgggagttggacaatatcaacacgatgtggcgcaaaaagagctcactgtgcaactcgatacagtgattgaggatgtcgtgaatagtgtgggagtcaacctgaatacggctagccctcagctgctacaacatatctcagggttgtcagcaactactgctcaaaacattgtgcaatatcgcaatgaaaacggcctttatcaaaagcggagtgctttgaagaaagtaccacgcttagggcctaaagcttatgaacaatcggtcggattcttgcggattattaatggggacaatccactcgataatactgatattcatccagaaagttatccaacggctaaagccattttgaaatcatttgggttaaccgttgatgctttaggaagcgatgcgttgaagacggcgattgcacaaatgcaagtaccggctctagcggctgaattagaggtcgggattgaaacaatcaccgacatcttaagtagtttgcaaaaaccagggcgtgatttacgggatcagatgacggcgccattgttacgtcatgatgtcttaaccttggcggatttgaaaccgaatatggcgttagaaggcacagtccgcaacgtgattgattttggggcctttgtcgatattggtgtgaaacacgatggcttagtgcacatttctcaactggcaaaccactttgttaaacatccttctgatgaagtggcagttggcgacgtcgttcaggtttgggtgatgagtgttgatcaagaacgtgaacgcgtacaactgacaatgaaagcgccaaaggcaaatgactgatcaagccttaactgaattgattgaacggttatcgttgcagttttttaatcggccgtttgtgcatcaagcaaatttcaatcggcgtttaaaaacaaccggcgggcgctatcatttacaggatcatcatatcgatatcaatccaaagatgttgaccgaacatgatacacagaccttagaaggggtgattaagcatgagctttgccattatcacctgcatctgttgcatcgcggttaccgtcatcgagacgcagagtttaaacaattacttgcacaagtcgggggtgcgcgctatgcaccagctgcacaaaagacagctaaatcgagcaaaattgtgatttataaatgttcagactgtgggcaagtctatccacgtcgccgtcgaatgaatacggctcgctatgtttgtcggcggtgtcatggacgactgatttatcaaaccacacaaattcaatgaaaaaaggccacccctaaacataggggtggccttttttttagttggcgcgtaaagtttgattctgagtggtgtagcccagcttctgatagagggccaacgcagccggattattccctaacacggttagttctaaataatcgagcgcttgtgtttgttgccattgctttgcggacgatagcagttgtgtagcgacgtggtggcggcgtgcctctggtgcaacatacagtgttgtgagataagcaaagcggtgtgcgataaacaagggtgagggacttgtttgggctgttgtaacgtgacaaaaggcatcgatttgcgcatcttggttttgatgaacaaagactgcttgtagtggatcagttatcatttgttgccagtcaaagaactcaggcgtgtaatcagcttggtaattagtgggttgtagcacatgcatttcagtcgttaattgttgatacagggtggttaatttggcaatatcggttagtttagcggggataatgggcatgtaatcgtctccaaagtaaaattttaattgacttcaatcatcgtttctcttatactaatgtacgtggcttaaagtgataaagcaagttacgcgggtgtggcggaatggcagacgcgcaagattaaggatcttgtcgggaattttcccggtggaagttcgagtcttctcacccgcatcataattcagttaggtaattccaattggaattacctttttttgtcccttgatgtaaatgattgaaactagggtgacaaatcgctataatgagcaataaattcagtttaggagtcagttaggatgacacataaaaattcatcagcttatacgattagtattatggcgattttaaccgcttttttaatcattcaaagttttattccgatggtcggttatattaatatcattcctgggctaccagccgtaacaacaattcatttaacggtcattattggggccgtgatcctgggcacacgccaaggggcgattctaggattaatttggggtttgatttcattatttagagcctatacctctccaggcgatccgctttcacttttaatctttcaaaatccaattatcgctattttaccgcggttgatggctgggatgattgctggctttacgttccaacacttatatcaaactaaaattcgtaaaaccggtgcaatggctttagctgggattttcggggctttaatcaataccattttagtgattggcttaacgcgtgtgctttacggacaccaagcggcagggatgtatcatactgatccgacccatttaatcatcgtgatgcttggcgttgttgcgttaaatgctgtaatggaagcaaccttagcagctgtggtgacaccactagtcgcaacaccactcatgcggtttaaacggacgcaataacaagtgcgggtagctacagccgacgattgtggtccgccacgggttgaataattaaagattgaaaaaaggagttggacaaacgtgactttgtccaactccttttttgtttattccagttgtttttgcactttcttagcatgcgcagcaactgtgttcatgttgaccttagcaatttcggcttgttgataaactgaactgtaatattgatttaaacgattgattggtgatttaagactgtcttcgtctgcatcagcatctgtatggtcgctgtaaaattcatcagatgctttagtggccgcgttgtagaaggtggccaaggttgtataatcaagtgtcgaaatcttaagactttgatttaaatctttgacttgttcaatcggcaattcatcgttttcttgcttgaccagtttggtgaggcgtttaatgaccggtttgagcacagcttgttgttctttaagactttgaaaggctgcttcgcgcttggccgcagtcgtcgcaatcttagtatcttcaatcgttaatagattttcgtcgggatattttttttgaatcgtgagatagttatcaggaactggatcgccgattgtttcgagggttgaaagagctgttcgttgttgcttagtcgcatcttcaacggtttgcatatcggcttggagttgatgtttagtatccatcggtttttggcaagcggctaggctcaccccgatgaagataattggtaatagccgtttcaatagttttagcataagcaagcactccaatgagaaaaagttatactgctatcttaacgtaattaaagcaaaaagccaaattatttagggcatgattcaacatataaaataacacttgtctaaaaacacggatgctgattgtccgtgatagaaaacggtttatttttattgccaaatggttgccaatggttgttgcctgtgttacactatgtttgtactttttgaatggttgcggtacgaatgtttccaaaagaactttcttccatcggaccaccagaaatacacaaatttataatgtgtcatcgacacaaggaggatttttctcatggaaaacggaactgtaaaatggtttaacgcagaaaaaggttacggctttgtaactcgcgaagatggtagtgatgtattcgtacatttctcagctatccaaggtgaaggctacaagactcttgaagaaggtcaaagcgtttctttcgatatcgaagaaagcgaccgcggcccacaagctgttaacgtaaacaaaaactaatttaaaaattaacctaggggtcgcggcaaaagcaattttgtcgcgacccctttttttgattgggtggtgagctggagatgttaacgtatcaattgattgagggcgcagcacggcgacagtggctggatgatctattgttagcggatgaagaagtcggcatgattgaacgctatttgatgcatgggcaattttacaccgtaagcgatcagcagcaagtcatcggggtcttccatctgatggcactcaacaatcagcaggtagaacttaaaaatattgcggtacggccagaatggcagcatcgaggattcggtgggcaaatgatgactcaaattcagacgattgcaattgaccaagggtttcaatcattgctagttggcactggggacggcagtttggcagcaattggtttttatttgcgttaaggctttcggttcgaacaaattcgcaaaaacttcttcgaccaatatcaaacgccaatctatgaaaatgggattcgcctaaaagatatggtggttctcgctaaaatactctaaaaaaacctgaccaaattggccaggttttttgaatggattaatcgagatcagtgcgtttttcaaatggatagacaaagccccattcagcacgtgcgtctgacatgatgtccatgacatcgcttgataattcgagggtatcgtttgattgatttccgcgcactgtttcttggaaatcatggagttcatagttcattgcgttggttgcgtcacccgcttgaatggtctcaacgcgaccatctgggaaagtgagggtggctttgtcaggccgtggataatcgtcaacggtgacatagccattttcataaacgagaacaccttgtttaggcatcttcgcatgaatgtttaaggtaacagtcaccatttcatgcttggcattatttaaaagtaatgttgattgctgatcaacaccggattctgatggcacccattgcgtcgctacaagttctggtttagcagttaacatccgacgtgcaaatgagagggcataaacaccaatatcaagcattgcaccgccggcaagtgcgggactgaagaagcgattgtttggatcaagctctttataacttccaaaagagacttgaattgattttaaagcgcctaagtgattagcgacttgttggcgttcaatctcagcaaacaatggcatgtgataaatggtcattgcttcagctaatatcaagtgcttttcgttagcaagagcctttgctgcattgagttcgcggcggttcatcgtaatcgctttttcacagaagacgtgtttaccggcttcaagactcgccataatgctttcgaagtgataattgtggggggttgcaatgtagacgatgtcgatgttgtcatcagcgagcatgtcggcataactaccaaatgcatgtggaatattgtattggtcggcaaaggcttgtgccttatcgagtgaacgagaagcagccccataaatgtgaccatcaggttggttaaaataagttgcgaaactattggcgatattgcctaagccgataattccccagttaagcgttgtcaataaaatcagtcctttactatcgtaatcggttacagccaatattatagcaataaaagcgctaaatagaaattaaaggggggttacaaattaaagattggtgttctgaatgaatttgtgtacaatatagaatagattcagataaagttgaggcagaggattggcaaaaaaacgtaaacgcaagacgacaaaacgcaaaccaacagctaactactattctaagaagagacgccacccaaccgattggctagtggtcgttttagtgagtctatttattctcggaattgggctcgttttattagttcggtataatggacaaaaggcccaagaagaacttgccgatcaagccagacaggaacaacaatcgcgccaagctaagaagcaagcgtttattaaaaaaatggtgccatatgcccaagaattacagacgaaatatcatgttttaccaagtattactttagcgcaagccattttagaaagtgattgggggaagagctcacttgctgcgcaataccataattatttcggtattaagggtgataatgaggccaacaccaaggaaatgacgaccaaggaatatttaaatggtcagtgggtaacgacaacagcgcgttttagagtatataacaattatcaagaatcgatgcttgaccatgtacaattgtttgcttatgggacctcttggaaccggacgcagtatgcacacgtaatcgcggccactaattatgagcaagctgcccatgcattacaacaagacggctatgcgactgaccctgattatccagcgaagttaattgagctcgttaaggcttaccacctcgaccaatatgatcaataaagaatgctatgaaacaaatcatgggaaatctgctactaattaatctcaaaagagcctgccacaaattccggtttgtgacaggctcttttcaaatcgctgaataactggatttgagcttgttgtgttgctttttttgtggtaatctatttttaattcaatttcagaaaacattattagtcgttactactatcggtagtgatgtttaacgatgctacaaaggagagctcagcgtgcgactattagaggaacgcattaaaaaagatggtcaagtattaggtcaagacgtattgaaggtcgataacttcttaaatcaccaagtggatccagatttaatggctgcaatgggtgaagaattccaacgcttatttaaggataagaagattactaaaatcctaacggttgaatcatctggcattgcgcccgctgttttcgcgggcttagcattccacgttcccattgtttttgcaagaaagcacaagagtttaacgttacaagataacatgtatagcgcaacggtttattcatacacgaagaaagtgaataaccacatttcaatttcgaagaagtttctgaatgcagacgatcgcgttttagtgattgatgatttcttagccaacgggcaagcggttgaaggcttactttctattattgaagaagccggcgcacaacttgaaggtgtcgggattgtcatcgaaaagactttccaaaaaggtcgcgaattgttagatcaacgcggcattcaagtggaatctttagcacgaattgcagcgtttgaagacggtcaagtcgtctttttagacgaaaataaataaatgttatttaacggagtgctgagaggcactctttttttgtctaaaaatttgttatcatggaggaaagtattaggcagacaacgcttaaattcgctataataagggtatacagtttggtgaacaggaaagcaggtaatatgatgccagttatttatccaggacaaaccatcggaattattggaaatgatcaacgggcctatatgttggcgctcaaagcaaaagaaatggggtatcgggtagccgcgattgtgaccccgcagatgcaaaatacctcatttgcacgtttaattgatagtcagatcgatggtgaattcaatgattatcaaacattagtccaactcggtgaagtcagtcaagtgttgacctatacgaatgaattattagatgagacagtgctcgaacaactggcacaacattattatctacctcaaggcagtaatgtgttgtctgtgacgcaagatcggtacctcgaaaaagtctttttgagtgatttaaatatcaatattccgccctatgcgacagttgttgatgtagatgatattcaagatgcaatcgattcaatcggatatccatgtatcttaaaacccattcaaaaaggttacggtaagcagtatcaacgttttattcaacaaccgagtgaccttgaaaacattgaagctgcccttgagttggggacttatattttggaatcttggattcccgacgcacaagaactatcagtgatggtcgttaaaactgaagatggtaagtgtgtgacactgccagtcatcgaaaatgagtttgaagatcatcgcttgaaaatgtcgcttgtgccagcacggattaatcaagatgttgcgactgaaattaatcgattagcccacttaattggggaaaaattagactatacaggtgtttttggggttgaattctttttaacacccgctatgaatatttatgtgaaacgaattatgccaacaccgcacgcaacgggcgatgtcttgacacataccttgaatttctcgcaatatgaatatcatttgaaggccatctgtcagttggcagtcggcccatcacgcctcaataatgcggggatgaccttagggattcaagaagcacaacggtcattaattcaaacacagatgaagatcaaaccggattggtactttaatttgcacaacgtcacgaccaatcaacagattggatcggtcacagcaaccggacaagccatccaacccttaatcgataattacgaagcggcagacttatattagagtgcgacagcgggcggttatcttttgaggactagcataggccggcgaatgagcgacgcagtcgatcgttggacggacgtagctagccgcagaaagatgcccgatggagcacgtttcaaaacagagtgcatttgtggcggttatcttttgagcattaactggatttgacgagttggtgatgcaatcgcgaatttggcaaatttggttaagcacagaaagatgccacaaaaagcacgttttaccatcaccagcatttaggtagtatttggaggagaagtttatgttagaacgttatacacgtcccgaaatgggcgccatttggacaacgaaaaatcggtatcaagcttggttggaagttgaaattctagctgtcgaagcgtgggcaaaattaggcgatattcccacagaggatgcgcagaaaattcgcgcgaatgctagctttgatttggcagaagtcaatcgcttagaagccatcacacaccatgatgtggtcgcattcacccgtgccgtttcagaatccttagcggatgaaaaaaagtgggtccactatggtctaacttcaacggacgttgttgatacagcacaagggtatattttgaaacaagcgaacgatttaatccgggctgatatcgccaattttatggctgttctaaaagataaagcttacgaataccaaaataccgtgatgattgggcggacgcatggcgtgcatgctgaaccaacgacgtttgggttaaaactagcaacctggtatgctgaaatgaaacgcaatcaagaccgttttgaacgcgcagcaaaaggcgttgaagccggtaaaatcagtggtgcagttgggactttcgccaatattccgcctgaaattgaagcctatgtgacagaacacttagggatccgggcccaagatatttcaacgcaagtgctcccacgagatctacatgctgattacattaacacgatggcggtcgtggcgacctcaatcgaacattttgcgactgaaatccggcatttacaacgaacagaagtccgcgaagtggaagaattctttgctaaaggtcaaaaaggctcatcagcgatgccgcataaacgcaatccaattagttctgaaaacgttagtggcttagcccgtgtgattcgcggtcatgtgattaccgggatggaagatgtgtcattatggcacgaacgcgatatctcacatagctcagctgaacggattattttacccgatactacgattttattggactacatcttgaatcgcttcacgcggattgtgaagacgttgacggtcttccctgaaaagatgaaggctgacatgaacatcacccatggtttaatttacagccaacgtgtcttgttgaagttagtggatgcgggtctgagccgtgaagcagcctatgatttggttcaaccgaagacagccttagcatgggatgaacaaaaagatttccgccaattattagaagccgatccgaaagtgacgagtgaactttcaaaagccgatttagacgacgcctttgattaccaatggcacttaaaacaagttcaaacaatttttgatcgggtgtttgcataagcatccgacataaaaagccaccttagcctaaaagttaggttaaggtggcttttttatggcaaaataaattctgattcgaaacgacaaacttggtgatggttactgagggcgacttcaaacgctttttgccctagggtgaagaagtgatggtcaattgttggcagttgcaataaaaaactggataattgtttttcttgaccaattaaaagcggggtcggcagttgatgatccagatgatattggcggacaccagcggcaatgtcgtcgccatttgtaaaatagcaagcgagggttggctgtttttcaaccagttgttcagcggcgcgatagccatcttcaaatgagcgcatgccaccgaccattaactcggaatcaggttggcagttgaaaacttgttgataagcgttcgtgacggcaatccaggtcgggctttgcgctaaattacgacttaatagtagaccaatttgctgtgctttgtgggctttaaggtacttgaatgccgctaaataggcgggctcacggtgagaataaacggccgagatatgatgggtccccgggtcttcacaacagacaatttgaccataacgcgtgtactctgctaagactgagagtgcaataccatgtgaagtaaaaatgagtgcggtaaaattcttacgttttaattgttcgagataatctagttcgactgcttgattatattcggaaggtaggagcacaacgtgatagccgcttgaaaacgcagcatccataatcccgtttaagagttggttgaaatacggatggtcattgtgcggtaggacgaccccaatagttttattttgaccgaagcttaaatcgcgcgctaagctattaggcacgtaatcgagttgtttaatgaccgcttcgattgccgttttggcaggttcagagacgtatttttgatgatttaacacacgggagacggtcgaaaccgaatagccgcttttgcgggcaatatcacgaattgttggcataatcctaacctactttttgattaactttagtaatgtatttctttagaccatagctgaagccactgtgatgattagtcttcgtaatgaattgacccgccatctggatttgatcactggcattgcccatgacgatggggtggccaactagcgataacatggctaagtcgttttgaccttcaccaaacgcggcgcaatcagcgactgttagtccagtgttttctaagatggtggttaatgcgttagctttagtggcttcatgactcgtaatttctaaggtcattgtacctgattgttgtactgaaagaccaggcaagtggcattggttgatgaaatcagcaacagttgcccgttgttgtgtcgtttgcataatcagttgaattttgaaaagcttgagaaatggattttgcaattgatcaccaaaattgatgagcgtcggcaattgaccggtttgcttagcgattgcctcaataccagcgtcaattgtctgcgtgtaccagtggtgtaagtcatacgcacttaaactgatgtcactaaattcagattgtaatgcggcaattaatgttgcgacagcagaggttgcaagtggatattctgctaaaaccattgggaaaagatctgtcggttgataaattaaccccccgttaaaagcgacttggggtgtcgttaacgctaactgatcaatcgtagcttgcatttcttgtggtgaacgcgcagaaatcaaggaaattgggattgggcttgctttgacagccgcaatatctttttcagaaagctgtccgtcttggtttaacaatgtaccgtctaagttagaaaaaatgtatttaatcatgatgcataccacctttcttggattaaggtgagtataatttatgaaacgcgtcccaggtcaaggcagaagattgcgaaaaattagaatccgttttactagatcgtgttcgcttttttctacctatctagtttggtataatataggctgattgcatttacggaaggatgactaatttgtctgaaaaagaattgttacaagggatgaacgataagcaagctgaagcggtcctcacaacagaaggcccacttttaatcatggcgggtgctggtagtgggaagacccgggtgttaacgcatcgggtcgcttatttaattgaagaaaagcacgttttaccatggcgcgtgctggcgattacgtttacgaataaagcggcgcgtgaaatgcgtgaacgggtcggtaacttactcggcgaaggggctcaagatgtttgggtatctaccttccatgccctttgtgtgcggattttacgtcgggagattgaacaaattggctacaatcgcgcgtttacaatcgcggatccttctgaacaattgacgttaatgcgccatgtttgtcgggatttaaacatcgacacgaagaagtttgaaccaaaggcgattttaggcacgattagtaacgccaaaaatgaactccaaacaccaagcgactatgcgggtctagcaaacggaccattcgaaaaaattgtggcccaatgctacaccgaatatcaaaaacgactccaacaaaatcaagcgctcgatttcgatgatttaatcatgcaaacgatccgcttatttaaagaaaacaaaccaacgcttgaacactatcaagaaaaattccaatacatccacgttgatgaataccaagataccaatgaagcgcaatacacattggttaacatgttagctgataaatacaagaatctctgtgttgttggggatgccgatcagagtatttatggttggcggggcgctaacatggacaacatcatgaacttcgaacatgattatccagatgctaaatcagtgatgttggaacaaaattaccgttcaaccaaaacgattctagaagcagccaacggtgtgattaacaataatcaatatcgtaaacctaaggaattgtggactgaaaataacgaaggacaaccaattacttattatcggggtcaaagtgaacgtgacgaagcactctttgtcattacgaagatccaagaagaaatgcaaaagaaccaacgtaaattcggcgactttgccgttttataccggacaaatgcccaatcacggtcaattgaagaagcgtttgtcaaagccaacatgccatacaagatggtcggcgggcataagttctacgatcgtaaagaaatcaaggatatcttggcttacttacgcctagtcgtgaatgcgtctgattcaatgagttttgaacgggttgttaacagtccgaaacggggaattggccccggcactctcgaaaaattaacgcaattcgcggatgatcatcaatggtcattacttgaagcagcgcaaaatgcggaactctcaaccattccaggtaagagtcgcaagacgttgatcgattttggcaacgtcattggtgacttagcgaagatgcgcgaatttttaaacgtgacggaattaacggaacaattattggataagactggctacaaaaaagcgctcgaagttgaaaataccctcgaagcgcaaagtcgtttagaaaatattgaagaattactctcagttaccaaacaattcgacgaacattatgaaccagaagaagatgacagtgatttatttgtggacttcttagccgaattatcattggtctctgatttagattcagtcgaagaagaagccagtgaagtgaccatgatgaccttgcatgctgctaaaggacttgaattcccagttgttttcttgatggggatggaagaaggcatcttcccactatcacgtgctttattagaagaagacgaactggaagaagaacgccgtttggcatatgttgggattacccgtgctgaaagcaaattgtacttaaccaacgcttattcacggatgttatacggccgtcaacaaagtaaccaagcgtcccgatttgtcggcgaaatcgatgataaattattggattacgcaaatggcaatgctggcagtattccagaacgcaatgtgccatttggtaagagcaatcgttatgcacgcgcaacggctacaacgtataatgcaaataaaacaacgacgagtcacaagattgccgacacaactggcggcgataacagcggcgcttggacagccggccaaaaagtccaacacaagaagtggggcattggcacagttgtcaaggtcaacgggaccggcaacgaccaagaactagatatcgccttcaaagaacaaggcgttaaaagactactagcaagcttcgcaccaattgaaaaagtagaatagagtgcgtttccgacggttatcttctgaggattagcacagtgttgtgaatgaccgacaaagtcggtcgtttgcaatacgaagctaagcacaagagtcagctttaaaaagcacgtttcaaatcataagcagtgaggagtcttcattatgggattagctaaaccaatcgatcaatatacgcaaactgaagcggcagcggcggcccaagaactccgccagacattagctgaatacagcgaagcctattacacaaaggacgccccagtggttgaagatcacgtgtacgatgaattgtatcgcgacttagaaacgttagaagcggcctttccaatcattgttactaatgactcgcccactcaaaaagtcggtgatcaagttctgcctggctttaagaaagtgacgcatgaagtaccgatgttatcaatgggcgatgttttttctgaggaagaactcgcgacttttgataatcgacttcaaaaaaacgttgagcatgccatcgaatataatgtcgaattaaaaattgatggactcgcgattgacttgatctatgaaaaagggcaatttgtccgtggtgcgacgcgaggcaatgggacgattggggaggacattacccagaatcttaagaccatcaaggcgattccgcaaacattaaccaagccagtctctattgaggtccgtggtgaatgttacatgcccaaagcctcttttgcggcattaaatgaaaaacgggaagcagaaggccaaccgccatttgcaaacccgcggaatgcggctgctggtagtttacggcaattagatgccaaaatagcggctgagcggaatttgagtgcctttatgtacacgattgtcacctttgacgatgtgcaagcgacaacccagcacgaagcgcttgaagtgcttgcagaactcggctttaacgtcaatccaaccgctgaagtttgtcataatatgacagaggtaaagacctttatcgagcgctatcaagcaacgcgggatgacttagaatacggcatcgatggggttgtgttaaaagttaacgacttagctttacaacgccaactcggtaatacggttaaagtgccacggtgggagattgcttataaattcccgcctgaagaagcggcaaccattgttcgtgacatcgaatggacaattggtcggacaggggttgtcacgccaaccgctgtgatggatcctgtccagttggctggtacaacagtcgcgcgcgcctcattgcataacgctgatatgttacgtgataaagatgtccgtttgttggacacggttttattacacaaagcgggcgacatcattccagaaatttcacaagtagtactggctaaacggccggctgacagtcaaccgtatgtgattccgacagaatgtccttcgtgtggtcatgaattggttcatttggatgaagaagttgcattgcggtgtattaacccaatgtgtccggcacaagtgaaggaacagttaacgcattttgcttccagaaatgcgatgaatattgacggcttaggtccacggattattgcccaattattggatcaaggattggtccatgatgttgccgatttataccgcttaacggccgatcaacttgcgcaactggataagtttaaagaaaaatctattaataatttgttaaatgcaattgaagctagtcgccagaattcgctagaaaggttattatttggattagggattcgccatgttggtgccaaagcagcccgtttattagcggaacatttcttgacgatggaggctttgatggccagtgatcaagaagaaattatgtcggttgatacgattggcgagacgattgcggatagcttagcgacttattttgctgatgatcaagtacaaactttaattcgtgaattggctgaagtgcaagtcaacctgacctatactggggtgacaaaggcacaagctgaaaatagtgatagttactttaacggaaaaacggttgtcttgaccggtaaactatcgcaatatacccgcggtgagttgaaacaacaacttgaagataatggcgctaaagtgaccggctcagtttcgaaaaaaacagatattttgattgctggagaagatgccggcagtaaattaaccaaggcgcaagcattggagattccaattatcaacgaagcagacctagacagttatttggcgcaataagcgaatcaattaggacttataaggaggccattttcagtggcaaagtataaattatgggtagttgcagccgcaacggttttattgttggcaggttgtacaagtttacaaagcaattcgagttcgtcatcatcaactaagtcgactaaaaagctacaaacgaccgggaaagtgactgacagcatgtatgaaggggttattgataataaccaatacaagacaagtcagacacgtggattaaccacacaacaaagtaacacggcatttgatgtgaagagtttggaaagtggcttattaaacatttctaaaaaacaattccctactgataaatacctctaccaagaaggtcaaaccatcaaaacggcggaagcgcaaaaatggttggcacgtcaatcaaaagataatacacttggcttaaatccagaagataatggtgaaaaagaaccggataagcggaatccactgtatctccaacaaatcttagaacaagacttcttaggggcagatggtgcgcttgaagggatgagtattggtcttgggatgaatcaagtggattactataccaaggaacaatatggtgctacttttgaaaccaaaatttctagtgccatgatggcgcaacaaggtaaacaaatggccaataaggtcttaacgcgtttacggcagaaaaaaggtttgagtaagacaaccatcgtggtggggctttacaaacaagcacctaaggatagtttagtgggcggaaccttcttcgcttatggggtcagcaaaaacggtagtacaacgattgattcatggcacaaaatgaaccaagccaaccaagttttcccactcgttaatgatgaaaaagcggtcaatcaaagtgatgcggacgcgtttactagttttaaagaacaagtccaaaccttcttcccgaacttgagtggtgtcacggctcaagcacactatgaagatggtgtattggctgggatgaacatcaccgttaatacacaattctacagtgaaacagaaatcatgagtttcacacaatacattgcaaccgctgctgataaatatttaccacaaaatattccattagatatttcaatctcgtctgcagaggggatgcaagcttacgtaggccgagcagccggcagtaaaaggttctcaacccacgtattcgggagttattaattaaagagtgcgacaacagtcagttatgactgataggcaaaaaaatagcgtcgacaactaacgcagttgtcgacgctatttttttggacctttaaaagtcagtggttgtaattttaaaaataacagtgtacaatatgcgatattgttgttattttatttattacaccaaaggagagcatcatgaacgagtttaaaacagcacggaattggctagacaatgcggatgccgtcattattagtgctggtaacgggctatcaattacggaaggttacaatatttttgcacacgacgaagcgtttatgacccactttgggactttttatgaacgctacgggattatgaatattcttcaaggggctttttacaactatccaacagtggctgaaagagatgcattttacaaagtattgttcgattatatggttgatcactatgaaagtacacctgtctttcgcgatttaaagtagttggtgggcgatcatgaatactttgttgtcacatcaaatggcaacatgcattttcaactgagtggatttgacgaagaacggatttttgaagtggaaggtaattttggtaacaatcaaaatccaatgccgatgattcaaaagcaacaagctaagtttaacgcatttgttcaaaagtaccgttcacaaaacgtggtgattctggaattaggaattggtgctaataatcagttaattaaggcgctcctcatgcaattggtggcgcaaagtctaagttaccgttacatcacgttgaatttaccgcacgaaatcaatattcccgcagccattgaacaacggtcaatcggtcttgctggatcaatcgatgatcattttaaggagctcctcaaaaatgactaatttagactatcaagcaacactacaaaaaatggcaacgacgctcaaagaggcagattacgtcatcgtgggagccgcagccggcatgtcggctgcggctggtcccgattggtataatcccggcgatttatggggctttaagctgtctttaattcattttgttttacatgaaccagtttaccaaccgtatcaggacttgaaagccattttaaaggatagagactatgatttgataacgacgaatcaagacgtgcaattctcgaaagcttttccagataaagatgtcgccacgattcagggtgactggtcctattttcaatgtgccgataaatgtcatgattaagtctatcctaatcagacagttgttgatcaattatttccgcaaattgaaaatggccatttacccgaaaacttaattccgcagtgccttaaatgtggtgctgaaatgttggaatgggtccgtggttatgaatttcttgaaggtcagcactacaacaatcaatacgcaaagtatcgtcaatttattcaaaaagctgaaggtaaaaaaacggtctatttagaactaggtgtgggtatgatgacaccgatgtttattaaggaaccgtttatgaatctaacgtaccaaaatccacaagcaacatatatcaccgttaatcccaaagatgcgattgtgccacgtgaattaacggaccgcggtattgcagttaagtatgacttagtaaaggtactagcaaatctaaaagagtgcggcatcagccggatatccgctgaggattaacacagaatggtgaataaccgggttagcgattgtttgccattcagggttaaccggaagcggttggctgatagagcacgtttaaaagaaaagagtgcggcatcagccgggtatccgctgaggattaacacacaaaaaggttgggcaatttgcccaacctttttgtgtgttagttttcgtaaagttttaattctggattttcagtgagacgttgctgatattgttcgataatgtcggctagtttgatggcttgcatttgctgttcagcagtttcttggatttgatcgtaataggtagcaagcgataattgaatattttgtccggggccgcaactaggatcaatttgggtatcgatgttcaataaccgggtatcatcgacggctttatagatatcacagagcgaaatttggtcaggagctttcgttagtttgggttcggcatggcccttaacgctcgtcaataggccagctgtcttaagttgtcccatgatttggcgaataaaagaggggttagtattgatgcttttagcaatgcgctgactagaaaggttatcaaacgggtttaaagcaatcagggtcatcaggtggacggcattgcttaaacggactgattttttcatgatagactccttttaaaaagatgttattaagagtataacacctattgaggtgttctgctgtgatcaggctagccagagtctgccgtaaatgaaaattacatgaagggagttcagactggataccgataatacagcccgataattaattaagttgcttctatcagtaggtttgggttcttttatgagcatgaaataagttgtgaaatgtctattaaaattagacttatttttgaaaaatcattaagcaataaaaaaattcacccaaaattttgggtgaactcatcaaactttaatgaaattattttagcagtggagtggttataaacgtttaaaataggaaaaaaacaattctaaatagtttagtaacttctagtatgggtaaatccgtaagttacaccgacagactattgagtgttgcttttgaaactactcaaaactggggacgcttggttacgatacttgccgcttagctaatactgagtgttatttgttaagttggaaagccttagtgattaagtcttccaatgatgacatgatttgattgctagcccaatctgttgtgagttgtttgaaagcaattgctttttgatcgatgtcatgtttcttaggcattggtttgaagttttcggctggttggtcttcttcaactgctgtttcttcaaattgttcaggtgctacttccggtgcggctactgtttcgtcttgaacttctgcgggggcagttgtgcttcgtgagccatctgctgattcccagtagtgagttgtttgaccgccaattgtttcggtaacttctacaggttcgctgtcatcgatttctgtttgtaaccatgcttcttctaaagcggcttgttctgcggctgcttctttggctttagcggccattccaggtgttacaccagtgatagttacaccaaccgaagtggtcgctgctgaaacggtcgtactttgtaagacaatgccacccattaaacttaaaactactactgctacaaggtgttccgagatattgattttcatattataacactcatctataagttaatgataatcttgtacattattcacaacttcttatctgtactcagtatataagattaaacgaattcttatctatgataaactcttataaatcatatcgccttctaatgaattgcataacattcaattacgcttttaaaaagaaagtaaaaatatatttcaatatctgctgaaaccggtaaagattaggaaaaactggtaaattccaagggatgtcactttcttatacgttaatatatggtaaaattaatcagaatggataaaagtgacagaattagaagaggggtttactcatgattgataaaacacaagttcagcatgtcgcagaactttcaaaactagcttttagcgatgctgagttagaacaatttactgaacaacttgcagacatcatgaaaatgactgatgaattaaataaagttgatacaacgggtgtcccagtgacgacccacgtgaataaccttcaaaatattgtccgcgaagatgtggctcaagctggcacagatcgcgagattttaatgaagaatgcaccagattcagcggacggcttattgaaagtccctgccattatggataaggaggaagactagccgtgaactacttatatgaagatttacaaagtatccatgccaaattagtggctggtgacttaactgctagccaattggtaactgaaacagttgctgaaattgacaagagagaaccacaagttgatgcttttttagcaatcgatgaagctggtgcacaagctgcggctgccaaagtggacgcccaaccaattgatgcagataacttattagctgggatgccaattgggattaaagataacttattaacagatggcttaacaactactgctgccagcaagatgcttgaaaatttcacgccggtttttgatgcaacggttgttgaaaaattaaaagctaaagatgcaattgtgatcggtaaaaacaacatggatgaattcgcaatgggttcatcaacagaaacatcagccttcaagaagacaaagaacccttggaacttagacaaagtacctggtggttcatcaggtggttctgcagcagcagttgcggccggtgaagtcgttgcttctttagggacagatacgggtggctcaattcgccaaccagctgcatttaatgggattgtcggcatcaaaccaacatacggtcgtgtgtcacgctggggtgcgatcgcttttgcttcaagtcttgatcaagttggggtctttagtcggacagttgctgataatgcgactgttttacaagccatcagtggtcatgatgaaaaagatagtacgagtgctgatatcccagtgcctgatttccgtgccgctttaaatggtgacatcaaaggtatgaagattgctgttgccaaagaatacatggcagaaggtgtcgaaccaggcgttaaagcccaaatcgaaacagccattgaaactttgaaatcattaggggcaaccgttgacgaagtcagcttgccaaattctaagtatgccgtccaaacttactacattatggcttcaagtgaagcttcatctaacttgtcacgttttgacgggattcgttatggttatcgttcacctgaagccaagacacttgaagatgtgtatgttaaatcacgttctgaaggtttcggtgatgaagtgaaacggcggattatgttagggacgtttgccctttcatcaggcttttacgatgcttacttcaagaaggctggtcaagtgcggacattaatcgtgcgcgactttgaaaaagttttcgcagactacgacttagtggttggaccaacaacaccaaccaccgcttttgacttgggtcgcaaagtatcagatccagtgacaatgtatatgaacgatatcttaacaattcctgctaacatggctggcttaccagcaatgtcagtgcctgccggcttagtagatggcatgccagttggtttacaaattattgggaaagcatttgatgaagaatctgtttatcgcgcaggttatgcctttgaacaagcaactcaatttaacaagaacgttccaagcttcaaaggaggaaaagcctaatgaatttcgaaacaacaatcggacttgaagtgcatattgaattaaaaaccaattcaaaaatgtacagtccatctcctgtaaactatggtgcagaaccgaatactaacacgaatgtgattgactggggttatcctgggacattgccaaccttgaataaaggggcatacacacttgggatgatggttgcgactgccttgcacgctgatattgcgcgcgatacgcatttcgaccggaagaattacttctatccagataatccaaaagcttaccaaatcacacaatacgaacaaccccttggtaaagatggctatatcgaagtcgaagtcgatggccatacaaagcaaatcgggattgccgaattgcacgttgaagaagatgccgggaagaatacccatggctctgacggctattcatatgtcgatttaaaccgtcaagggactgccttgattgaaattgtttcaaaacctgatatgtcaacgcctgaagaagcctatgcttaccttgaaacgttacgccaaattgttcaatttactggcgcatctgacgttaagatggaagaaggttcaatgcgggtagatactaacatttctgtgcgaccaatcggtgcgaagcaatatggtgtgaaatcagaattgaagaacttgaactcctttaatcacgtccgtttggggttagcttatgaaatcaagcgtcaatcacaacttttgattgctggcgaaacagtgcgccctgaaacccgtcgttttgacgaaaaaacgggcgaaacattccttatgcgggttaagaccggtgcggatgactatcgttatttcccagaaccagatctaccaccattacacattggtgatgattggttacaagaagttcaagacaatatgcctgaaatgccggctaaacggcgtgcacgctatgtggatgaattgggcttgcctgaatacgatgcgggtgtcttgacgaacaccaaggaaatgtctgacttctttgaagcagctgttgctgatggcgccgcaccaaaacaagtttctaactggttgatgggtgaagtgaatgcttacttgaacgacaaacaaattgaccttcaagagacagccctcacacctgcccacttagcccaaatgatcaatttgattaaagacgggattatttcatcgaagattgctaagaaagtcttccaagaaattatccaaaatgacacggatccaaaagcctgggttgaagctaaaggcatggtccaattatcagaccctgctaagttgacaccaatcatcacaggtattttagatgacaaccaacaatcaattgacgatttcaagaacggtaaagaccgcgcagttgggttcttagtcggtaagattatgaaggaaacacggggtcaagctaatccgaaagttgtcaatgacttgttgatggccgaattgaacaaacgataattgatattttaggagattcgaatgcaaaaacgtgcacggttaatttataatccaacttcaggacatgaagtgatgaaacgtagtgtcgctgatattctggatattttagaacaagcgggttatgaagcgagtgcttttcaaacaacgcctgaagaagcttcagcgcaaaaagaggccacaagagcagcaaaggcggacttcgatttaatcgttgccgctggcggtgatgggacaattaatgaagtcgtcaacggcattgccggcttggaaaaacgcccaatgatggccgtcattccggctgggacaacaaacgattatgctcgggctttgaagattccgcgtgataatccggttgaagcagcccgcgtgattttgaagaaccaaacgcttaagatggatatcggtcaagccaatgacaattacttcatgaacattgctggtggtggtttgctaaccgaattgacctatgaagtcccctcagactttaagtcaatttttggctatctcgcgtatgtcgtaaaaggtgctgagatgttaccccaaattaaaccgattaagatgcatctggaatatgatgaaggtacgtatgatggggaagcttccctattcttactcggtttaaccaattcagttggtggatttgaacagattgcgccggatgcacaactgaatgatggtaatttctcattgattgtggttaagacagccaacatggccgaattagtccatttaatcgcactcgtcattaaaggtggcaaacacgttaatgatccacgggtcatttataccaagacgtcaaaactagttgcgcggcctagtgatgatgacgttaagatgatgattaatttagatggcgaatacggtggcgatgcaccaatgacctttactaacttgcaacaacatatcgagatgtatgtgaataaggaagatattccagatcacgctattacatcagaaacccctactcagcagtctgccgaagatttattcgtaaaggaagtcgaagcaatttctgaagaagacatagacggcgatggtaaaataggttaaactggaacattggataacgtgggcggattgaccgcacacttgtagctaagaaaagagtccgaagcaaaactcagttttgtctcagactctttttacacaattaaaaagaggtaactatgaaaatacaagcacctgtaagaaaaaatgaaacattgacggttgatattatggatttaacctatgaaggcatgggggtcgctaaagtcgacaactatccgttgtttatcgaaggcgttttgcccgatgaacaagcagaaatccaagtcacaaaggtcaataaacaatatggttttgcgcgcttagttaatttattgaagaaaagcccagaccgcgttgaatcaaaagctaacatttactcacaaactgggattgcgccattacaacacttggcatacccagcccaattagatttcaagcgtaaccaagtcttgaacgtcttccaaaaagcccatttagatattccagtgcaacctgttttagggatggatgatccaacgggttaccggaacaaggcgcaagttcctgttcggtttatcgatggtgctttaacaactggtttctaccggaaacacagtcatcaagtgatgccaatggaagacttctacattcaagatcctaagattgatgaagctatcaaggtcattcgtgatatcttgcgtcgtttctacattgatccatacaacgaagatacgcataagggtgttttgaagaccattatggttcgccgcggttattacagccacgaaatgatgattgtcttcatcacgcggagtaagaaattaccggctgcccgtgaaatcgccgttgaaatcaaaaaagctttaccagaagtggtcagcatcatgcaaaacgtcaatgctgctcaaacgaacgtcatctttggtgacgaaacaaaattaatcgctggccgcgactttattcgtgatgaattaatgggcttgaagttcgaaatttcagcgcaatcattctaccaagtgaacccagtgcaaacggaagtcttgtataacaaggcaatcgaagctgctgaattaacggggaacgaaacagtcattgatgcttattcagggattgggacgatttcattagcagtcgctaaacatgctaagcaagtttacggtgttgaagttgttgaatcagctgttatggatgcgcggcacaatgccaagattaacggcatcgaaaacgttgaatttacactcggtaaagccgaagaagtgatggcgcaatggcaagcagatgacttaaaagtcgatgctttgattgttgacccaccacgtaaagggttggaagctagcttcatcgaagccgttggtcaattaaaaccagccaagatggtctatgtcagctgtaatccagcaacgttggcgcgtgatttagaactattggcagcccaaggctaccaagcagaaagcacacaaccagtcgacatgttcccacaaacgctacacgtcgaaagtgtcactaaattagtattttttttataaatattttttgaatatttattcaatctcgtttgacccgttatttcgttagcaatgagcttttctctcgctgacaacatagaatactataccaacaatccaagacatcgtcaagcgattgtttacttttttttgaataaaaatataaaaagtttcaaaagcgtacattgttgaatagatattcaccgattgtccgaactaattcaagtgcgggacactcgtgacttctaacttatccagtaattccgtgaactcactagggttcgcaaatcgaaaaccggcttcactaattattctcaattgttcggtataaaaatcagtctcatgagctccccactgaaagacaaagaacgaaacgttctcaccttcaaggttaatattcgctaaattgatcaatctcaattcgttaacatcaatatttagctgtgcttggattgcaattaatacagcagcaagtggtgtttgatcatcttgcttattggtcaccagcatcttataagaagcatcaacttgtggttggaccaaaaaatcatattgtccttgctctgtcttatacataatcgttccggctactttagcactcatacattctcacccttattcaagtcttctatcgcttcttcagtccatcttggtaatcgttctgcaatgggcgcaaacccaatatgaatccggcgatttgtccaatagtgtttcttagcacgctgtggtgctaaatcttgtgctttatgtagcgcacgtaacgacaaactaatcttatgtgtgtattcatcgatatctaacactaatacatctaacacttgaccgactttaaactgttcatctaacgctttaacaaaaccatgaccacattctgagatgtggattaagccttggaccgttgcatctaatgaaacaaatacaccatatggttgaatgcctgttacagtacctgtaatcttttgtccaattcgataacccatattttcctccatttcaatattcctatctattttaagccttccagttagtaaaaggcaagctatcggctaagaccttttatacaatttcttctataatatgtaaaaagaacctgaggaaacatccctcaggttctcatttaactaaagttgatcagctgctagtaaaagtgccccagtaatcccagcgtcatcccctaatgcaacatgcacgatgtagtcatcaaggtcaggcgtttgcacataacctgccatttgacgtttaaaggattcacgaatcattgggaatagttgggcttgtttcgacaccccaccaccgaagacaattcgttctggcgatagcattaaagcaatatttacacaggcttgagctaaatagtcagcttccatttgccatgcttgatgatcagccggcaataagtggcctttcttgccccaacggcgttcgattgctggaccagctgctaagccttccaaacaattgtggtgataaggacatgtcccttcgtatgaatcttctggttgttgccgaattaacatgtggccgatttcaggatggctgtaaccttgtaaaatctgaccgtgttcaacaacaccgccaccaatccccgtcccgacagttaagtaaacacaactatcaagtccatcagcagcgcccatcttcaattcaccataggctgcggcattcacatccgttgtaaaagcaaactgggtatcaggataatgagctttcattgctcctaagatatcatagtgttcccaccctgctttgggtgtatcgatgattgagccatatgtttttgatttcgggttaacatcaattgggccaaacgatgccaaaccaatggcatctaaatgatcgaattgatcaaaatattcaaataaccgtggcatcgtttgttccggcgtctcggttggcatactaattcgttcttgtatcccattttttccatctgttacggcacagacaaacttcgtgccccctgcttcaattccacctactagcatctaaaacacctcttcaattaaaattaatgattaatcgtaatgtgattgatgataacttcttcaactggtttgtcttgcattcctgtttctgtagcgttgatcttattaacaacgtccatcccactcaagacgtgaccaaatacagtatgtttaaaatctaaccaaggtgtaccacccttttcataagccgtaatgacttcttctgggtaaccagcacctggcatttgtgacaacatgttttggttgatatgttcgtttgttacgatgaagaattggctgccgttcgtattaggaccagcattagccattgataatgcaccatttaagttaaagacttcttggttgaattcatcttcgaaaggttggccccagagactttcgccacccatcccagtaccggttggatcgccaccttgaatcatgaaatcgttgatgacccggtggaaaatcacaccgtcatagtaatctttttcagctaagccgataaagttttctactgtcttaggtgcttggtcttggaaaagtgctactgtaaattcgccacggtttgtgtcaaaagtagctgttggccctgcaaagtttgcaaggtctaattgtggatatgtcatttaatcgtcctccttgttttgactcacaatcattatgatagcgaattgcttcataaattactacgattatttcattaaacatgctttccttatttttttctagtatactaatttaagaaatctactattaaggaagttatctcatgcttgattcaaatcatctctttgatatcaccattattggcggcggccctgtcggaatgtttgctgcctattatgctggtatgcgcaaggccgatgttcagattatcgaaagtctccccgaactcggtggtcaagtcgcaacactctatccagaaaagcaaatctatgatgtcgctggtttcagtggtatctctggtgcacagctcaccgaaaacttaattgaacagctggcacttttccaaccaaccttgcaattatccactgctgtgcaaggtatcgaaccccaagaagatgggactttcgttcttaaaacaacgaagggcacgacacgcaccaaaggcatcatcattgccgttgggaacggggctttcacaccgcggaaactcgctgtcgattacgatccagaatgggaaaatcactatattcactacttcgcaaaagaaatggcgcagttcaaagatcaaaccgttgccgttgctggcggtggtgattcggccattgaatgggcactaatgctcgaaaaagtggctaaacaagtctatttaattcaccgtcgggatcaattccgcgggcttgaaagtagcgttgaagcactcaaacaatcaactgtccaaattaagacgccgtttttaatcgatagtttgaccgaagtgaaccaacaactcgcattaactttaaataagatgaaatcaaccgatcaagagcagctaacaattgacaaactccttgttaactatgggtttatctctgatactcgaattctccgtgattggggattaacattggaccaccatcaagtcgctgttaaccaacaactcgagacgaacatcccgaacatctatgcgatcggcgatattgctacctaccctggtaaagtgaagttaattgccagcggatttggtgaagcaccaatggctgtgactgagttactaacgaatctctacccagaaaaacgccaaccactacacagcacgtccattatgtaagagtgcgcaatatgcccgattaccttctgaggattagcctagtccagtaaattagcgacgcagtcgatgatttactggccgtagctaaccggaagaaggtggcttatggagcacgtttcgataagagtgctttaactagcggttagcttctgagtatagcatcggttagtgaatgagccgcacagccgaccgtttgcaaaccgtggctaaacggaagaagttgctagctaaagcacgttttaaaaaagccctgcatcaacgttttaaccgttgatgcaggactttttagtattttattaagcattattttttttcatttgactcttaaccgctgtgataaccatcggaatcaatgagaccccgataatccctaacacaacgagtgagaaatgttcacgcacaacagcaatgtttccgaagaagtaaccagctccgcaacagagtgtcacccacaagatactcccaatcacgtcgtaacggaagaacttcatgaaggccatctggctcccaccggcaacaaatgggacgaatgttctaataatcggcatgaaacggccaattgcaatggttttaccaccatacttatcaaagaagacctgcgcctcttcaattttctcggtattgataaacttgccgaagaaccgattcttcgtggcggctaaaccgacccgttggccaatttgttcattcaatgaatcacccgcaattgaggcgattaagaacaaggcagcaaacagccagacattcaagtcattatcagtccgggctgccaaagcagcagcggcaaataaaagcgagtcccccggtagaaacggtaagataaccgccccggtttcaacaaagataatggcaaacaagatgacataggtccagttgccgaactgattaacaatgttgaccaggtgggcatcaatatgtaaaacaaaatcaattaactgcgtcatgcgatttctcctatactctttttcaatttaaaaatatatcccttattaggataccgaatccatgcatcaaagcaatcacttttgcattttcttaataaaaagccaaacgttatagcgcacgtttaccgcgccataacagccaagcaaaactaccctctaacaaaatgaagaagagtgcaaaacaaaggccaaaatagacttccggtaacactaagataatcggatcagtgattggatcaaactgccagttcagattgtgaaacaataattcgtggaacgtaatgaaaaaccgatcgaaattcatactagcaataaaccctaatatgggtggcaccacaagagcaacttgcattgggcggacgtattgccaaacccgattggtcttgcgccgactccgccaatgctgaatcgccgctccaatcgttactagccaaataactactgctaaaccaaacaagcgtttcacttcaacaaaatgttgccgaccatccaatgacattggaaagtcaggtagttgtaagcgtggttgccatggcacaagtaagtagcccattaaccggttaaagttcatcatcagccgcggttgcgttaattcccgttgactcgctagatcgaggtagtgactcactagcggataaagtgcccagcttaacaataacgttattaaaatcgcactgctgactaacgccaaatacaacgccgcccaactagtggtacttctaacccgctttaaacgtcccattcggttaggtcgttaatgatatgcgttggttgcaaggcttcttttgccacatcctctggcgttgaaacaccagtgtaaactaacaacgtatccatccctgcattcaagccagccttgatatctgtattgtagttatcgccaaccatcaccacttgttccttcgtcaagccgaattgctctaaggccatttccataatgattttttcaggcttaccgatatagagtgcactttgttgcgttgcccgttcaaccatcgcaatcactgaaccagcacctggcactagcccgcgttcgtttggtaaattcgtatccgcattggtgccgatgaataatgcaccgcgcttaatcgctaacgttgctaattcaaacttgtgataagtcacatcataatccaaaccaactaccacgtagtctggatcgaattcattggttctaaaaccggcatctgatagagcctgcttcaaaccgagttctccaatcacgtagaccgttttgccattcgctgtaccaccgtttaaattcaatagatagcgcgccgttgccaaagaaggggtatacacttggtcaactgtcgcatgaatgtcatggttatccgccaaattctgaatcacagcagctggtgatttcgtagtgttgttcgtcaaaaacataaacggaatttgttttgcttgtaggcgttcaatgaaatctttggcttctggcatccgatcacggccgcgatacacggtgccgtctaaatcaattaaataccctgcataatctgtgtttgtcatagttgtctaactccaattacgttttactttttattgtgttccaaaggacggatcttaaaatgacgcttattaactgatttttgattctcggttaccgccttttgagggcgttctttagtcactttttgcttgttatcggtgactttccgttctgtaaaacctggcttttgacgccgacgccgttgctgaccacgttggcgattactccgccgattctcattcttaatgattggcttgccttgacgttccaaaacaaagtaggcacaaccaaagttgcagtattcgtatagataatcttgtaacgtattgattaattgatctttattagcgcgtttgttggttgctttgtaaaagcccttcaaacgcagttgttcaaagccccagtcagccacaatataatcgtacttagccaacacttcattatagcgttcgttcaacttttcagcgtcgaagccttcacgatagttcacaacgacttcataagcacatttatcaatctcaagcgtggtttcagtcttcatgacaacgtgttgtggcacttccggttgtttggctgaagcgatcatttctttttcaatcgccttggtcactttcttggcaatcttgggactgtttttcgtatccgccacagcgaacctcctcttcccttataagggataatgtttacttaaatatttagcgaccgcgtctctgagaaaatcagggaacacgatctcggtctcgccaacaatctcaattgttggaaagaatggaatgaatagataatgatcgacggtcgtcaacgtatagctggcttctggatcaatttcttgcccatgccaaaagacgcgccgcaatttcatatcaaccgctatcccgtcataaacgatgtctccaaagattttaccacggaaactcatccctttaatagggaacttgcgtaaaaagagccggtttttctccatttcaagcaccatccgccacaaatcataccctttgagcgtcactttaatcagatgcattggatgcggtaattgagtttgcaaatcatctttagtaacaatcccagcctgcaaatcttgcaagaacaagccagtattcaatacggcagcttcagtgctggtcgcttcttcaattgcctttaaaccggtcgtcatcatttctgattcaccaattgcgttgattttaaaagcgtgtggcaacttggcaacatgctcggcggctaattgtgcgtgcccctttttcaggtagccttcaatttctgctgcgtcagtcttcacaactggtaagtccgcggttaaaaccgtccgagcacttttatgcatcacatggtgctgatcatccagttcaagcgtgatatcaccaaggtaatgaccgtacttctcggcagccgtcaataaggtttgattaaccagcagcccctcttctaaaagatgatgcgtgtgcgcaccacagacgacatcaatctcagggaattgttccgccagccacttatcagtcgtaatcccaagatgtgataggacgattaagatgtcatattgaccttcaatcgccgctaattgccgcggcaactcttcactgacagtcgtcggttcccaaccattcggccgataagttaagaaaaatggtgcggtcaaggcaataattgctacccgcgttccagcatcggtcgtcattagtcggtaagattgcgcaaatgctggcctttcgtttgttgcttgttcatacagattagccagtaataccgggaaattcgccttatcatacaaatgttccagatcagcatgactattaccgattccttcattgtttccaatcgttactccgtcatacccaatttgattgagtaactcggtattaatctgaccattcgttgcttcagtcaatggatgactacgatccattgcatccccgatgtcgaaggtcaagaccgtatccccttgctttcggtatgctgcttgatgttctaagaggaagcgccgcattctgggccaattttcaaaatgtgaatgtaagtcattcgtgtgtaaaatatgaattgtttccattttgcttactcccttcagctagtcgtggctggggtttgccagcgcggcttgtttgcgttcaaaaatgatttcaatctcatttgccgcaaggggtgttccaaacggcacccgttcaggtaataattcgcgctctggtgcatcaatcccgacattgatattctctgcaatcggcaacatataatgatgaatatgtccgtgcaagttgaacgtctgttggacctttcccaataataacggatagtgggttaaaaaatactgatggtgattgatcttaattagctcaccgacatcagcaaattgataatgcgccttgccagctgataatcccgcatcatgtttcgccaaatatttcaaaaaagcacggttatcatgattacctttaataataatcagctgcccattcaactgctctaacacagcagcgacttcagcaaaagcactcggcttattgggcaccattgcgacgtcacccaacaaataaacctggtcgtcagcttgcacccgttgattccagttagcaataatcgttgcattcatcgtagctacatctttaaacggacgcggcgcaaaatcattattacctaataattcggcgtgaaaaaaatgcgtatccgctgtgaaataaatcattcacaatcccacctaaccaatatgatttgcttttaaaatctcctgaaaggcttgcgcaactgcgccgtcttcttttttccattcttcccagtggtcaaaatcaaccgcaggcattgtgtaacgttcattaatgtaagcttcgtaagtttggaccgcattcgaatgcggaatgttgagttgtaaaatccggacttgcttaataaatccccggttagccgctagttcggcacgcccattcataaagatgttagccaattcataatacgttgtgccatctaagcgcgtaatttcttcaataatatcaaatgtttggtacttctccgccattgtgttacttcctattctaatccgatttcagttacgtttattctaccaatatgtacacaaaaaaaccactacccgcagatagtggttggcataagagagaaagagaattgataaaaaggtaattgcataagtaccttacaaacataatataccgtctaatgtaagcgttgtcaattgttatttttaatttatttatccgtttctttaaagttctgtaacaatcgtaggcatttgaaaggaataatggtatcttaaaaagagtagtttttatcaattgaggaggccattgatttgtcacagcaacattcacgatgggggcttttagtattaacaagcctttgtttctggtttttaaccggttttaccgttgtcgctcatcgtggcgaccccatcaacgcacccgaagaaacatttcaaagtatcgacatggccttttcgcaaggcgctaactatgtcgaactcgatttacacgaatctcaagatggcgtcttagtcatctcccacgaccgtaacttacaacgcgtcacggggaccgatgcgattgtttcgcaaaatacttttgccaagctcagtgaactcaaaatgagtaacggggaaccaccacacagcgtcgatcaattatttgagcactatcaaaacaacccaaatgcgaaattcctcatcgaaaccaagaaaaccaaaaagggaaatccgcaggacatggaagcaaaactcgtagcgctgattcaacaatatcacatgcaagaccgcgttatggtccattccttttccctcgctagtctgcaaaacatgcaacgtttaatgccagagattccccgcatttttatcgttggcagtttacagcggatttcattcgagagttttaaatacgccgacgggattaacatctcatcatccctcgtcaccccaaccatcattaaacagctccattatctccatcaaaaagtgtatgtctggaatgagatgtctgaaaaccaagcgacttggaactggttagtcaacctaaatgtcgatggcgtggtcacgaactatccggcactgggacgccactatcaggccgcacaggatcaagcagaaagtgaagccatcgacacaattgggcaagtcaatgacgttcaagacctccccaccgttgaaaatccatatgaaccaaccctcaataaaaagccggctaaagcgggccatatctacaacatcaccgaagccgttacaattgccgatcaaacttactaccgcattggcactaaccgctttgtcctcagcgacagcatcaacgtcggtgaaacagcgaaagccgctgctttattggtgggtaaaacggcgcagattaaaccaactgcgaacattgtcgctacttggaataatccgctacaccccacccagacaaccggttatcttagtgccaattcacaacagcaaattttaggagtgcgctatgttggtaatcaagtctggttgaaagtcgctagtggttggttcaagagtcgccaagcattaatcgacttcaacccaaaccaatcgctgatggtaacccacttttaccgtgaaattccccaacaattgcggccaaccaacttactgattaacccagcactgccactgccactgcaattgccccaacaaccaccagtcgacgcgcaactgtttaaccagtttgcccgttctctacaactaactaccattaaattctaacgaggtcaccttttatgacatcagattatgaacaattgattcgttccgtccaaaatactcttccaaaggaagaaacacttgatcacatctcaattctttttaaaatactaggcgataaaacacgcgctaaaatcttgtacgccctctttcaatccgaattgcgggtgagcgatattgtcagtgtgttagagatgtcgcaatcctcaatttcacatcaattacgtgcactcaagcaagcgaaactggtaaaaagtcgtaaagaaggcaaggaagttttctattcattagctgacaaccatgtcatcaatatcttttcgcaagttatcgcccacgtcaacgaacactaaggatcctattggcaccgatcaaattcactttggtcggtgctttttttatgtcccaaacccatcatctcgattgcattctatcgtgtttggtggtatcttatagtcaacatatgaatatatgctcatacgtttgtttatttagtaaagattacgatttagcttttcactcaacaaggaggcctaaataacatggcacaacttcaattaatcggcatcgattgtgccgcatgtgctactaaaattgaaaagaacgttaacaagatggccaacgttaaaagttgctccgtcaatttcaccactcaaaaattaaactatgaactcaccggccaagaagctgttacggaattcgaacaacaactcgctactcttttgccaaccattgaaccagatgtggggattcaacaatcaccaaccccagaaccatcccccgcaaaacatgcgattaattatgatctcatccgaattctcgtcagctctttaggcttggcgatttcttatctggtccctttaagcgcgccagctaaaaccacgttgctcctagctgcctttgtagtcatcggctacgatatcgtctggaccgcaatcaaaaatattctccacggcgaatggttcgatgagcatttcttaatgtcaattgcaaccattggggcctttggaatcggacaatatgccgaagccgttggtgtcatgttattctatcaagttggtgaatatttccaatcattagcggttaatcattcccggcgctcaattgctaacttagtggcaattaaaccaaccatcgccaatcggttagcggctgatggcaccaccgaagttgttgcacccgaagcaattcaggttggcgaacacatcgtggtgaaaccaggggaaaaagtcccgctcgacggtgtgattactaccggcgacagttacgtggacacctcagctattaccggtgaatctgttcctcgcgcctttcatcctggtgatgaactactcagtgggacgattaaccaatcaggtttattaacgcttgaagtcacgaaaccttatgctgattcaaccatcgctaagattttagaccttgtcgaaaatgcaagcagtcaaaaagcgcctactgaaaacttcatcacgcggtttgcaaaagtctacacaccaattgttgtcggcattgcagccatcatggccattgtaccgccccttttattcggtgctccatttggcgattggctctatcgggcattgattttcttagtgatttcttgtccatgtgccctcgtcatttcaattccactcggctttttcgctgggattggaacggcttctaaaaacggcatcctggttaaagggagtaattatctcgaagctttaaacgatgtccaaaccgttgttttcgacaagactgggacattgacccaaggtagtttcagcgtcaccaccgttcattcggtcgatcaacaacctgatgaacttttagcactagctgcccttgtcgaacaacactcgacccatccaattggtcaatcgattttagcagctaaccaaacgccactcacaaagacgttatctgacgtccaagaaaccgctggtcacgggattagcgggcaactcaacggacaacttttacaagctggtaaggctagttggttacaagccagtggcattgcaacactcacacctagtgaagtgggcaccagtgtccatgttgcttacaacaaccgctacttggggtatatcgtcattgcggacaccgtcaaaccagatgcacaaacggctgtcgcgcagctaaaacacgccgggattcatcaaataatcatgttgactggcgataaccaacccgttgcgcaacaagtcagcgccgtcttaggtatcgataagtatcaaagcgaacttctgccgcaagataaagtggccgccatcgccaaactcacagaagaccgcgctaccaacggaaaaatcgtctttgttggtgacggaatcaacgacacgcccgttttagcccgtgccgacgtgggcgttgctatgggcgggttaggttctgacgccgctattgaagctgccgatatcgtcttgatgtccgatgaaccgacaaaattagcaactgcgatttcgatcgccaagtacacccgccgcatcgtttggcaaaacatcattttcgcattagtggtcaaaggcatcttcttattattaggcgcctttggaattgccacaatgtgggaagccgttttcgccgatgtcggggtaacgttaatcgcgattttaaacgcacttcggattttaaagaagcactaaccttaaagggttcatggagactttgtgaaccttttattttttaatggcaagcgctttttaaatctgtaataatatgctaaaatgtgaatagattaataattaattaaccgttttttggttaaaatttaacaatgaaagctgggactgcaatgacattgaattggcaacaagaagcagcaaagtataaggatcaaatgcttgctgacttaacaagtttactcaagattaatagtgcgcgcgacgttgaccataaagaagacgacgcaccacttggccctggcccccgcgatgccttgctacaattcttagcaatcgctgaccgcgacggttttacaacaaagaatgttgaaaacgttgcaggtcgcattgaactcggtagtggcgacgaaatattcgggattttaggtcacatggacgttgtgcctgccggtgacggttgggaaacaaacccatttgaaccagtgatcaaagacggtaagatttatgcccgcggttcatcagatgataaggggccttcaatcgcagcatattatgctttgaaattattaaaagacaacggtatcgaattaaacaaaaaagtgcactttatcgttgggactgacgaagaaagtgaatgggttgggatcaaccgttacctcgaagttgaaccaaaacctgactttgcaatttcgccagatgcaaacttcccaatcatcaatggtgaaaaagggattgtgtcatacctcatgactttcaaaccagttgacggtgctgatggcgatatgacattggttagcttcaaatctggtttacgcgccaacatggtgccacaaacagctaaagccatcttaacgggtgcaatgccagctgatttccaagctaagtttgacgcctatgttgccgaccacaagttacaagggacaatcacaactgacggtgaccaaacaatcatcgacttaatcggtaaaggttcacatgctcaagaaccaaaagccggcgtaaatgctgcaacacacttggcaactttcttagctgactttgccttagatactaaaggtggcaactacatcggaacaattgcccgcttaatgcacgaagattcacgtgggcacctcttaaacatcaaccacacagatgatgtgatgggcgacttaacagcatgtcctgcagtcttcaactacacacaagatggtgtagcaacagtgctcttgaacgtccgttatcctaaaggtgtgactgctgaaagcacacgcgacggtttagcaaacacacttagtgatcttgctgacgtaacaattgacggtcatgcacaagaaccacattacgtgcctggtgacgatccattggttgcaacattattaagcgtcttcgaagaacaaactggtcttaaaggtcacgaacaagttatcggtggcggcacatatggtcgtatcttagaacgtggtgttgctttcggtgccttaccagaagaacgcgaaaatgtgatgcatcaagcaaatgaatatatgcacattgaagatatcatgaatgccattgcaatctatgcagatgcaatttacagattaacaagatagagtgcgtaagcaggcgcttatatttcgagcattaactggatttgacgaattggcgatgcaatcgctgattttgcaaatttggttaagcgcagaaatatgcctgctgaaacacgtttagagtgtgacgtaagtcgggtatccaccgaggattaatacaaagttgtgaatgattgcgtagcaatcgtttgcggctcagggttaaccggaaggatatggctgatagaacacatttagcaatcaaaaaaaacggtccaaagcttaatcgctttggaccgtttttttgattgccttcatttatcagcaggcatcagcttaaacgttgaatgcccatctttgacaattgcgtataagatttgttgctttgtttcatcgaagtaaccgagattaacagccatttcgccatcaatctcttcaatcccctcaaaatgttcccgaattatcgaacgaacaaccttcatgttatccatgtgtttttgaattttctgtacagcaacccctagcgtgtagccttcatctaagaaatgcttgataaagatcgccttaatcattgtttgcgcgtcgtactcgcgggccttattgccatccaattcacgcgctttaatgtatcctttttgctcccagtagcggagttgacgcggtgtaacccccgccattttacaaacttcactaatcccaaaaatcaatcgatccgtatctattaactttaaaaaaaggtctttttgcaagtccccactccattcctattattatttttcattatagataatctattgggattgtcaagttaaataacacctttgtcaacttacttgacaaagataccaaatgcgtctaaactaataaatcgcatcaacaaaaacacacaaaggagatttttatcttgtcagacgctagaccattagatattcatgggaaaccatataatcggacagtcttagtcttggtcttattgattggtactttctgtaccgtcttgaaccagacgattttatcaactgctttccccacattaatgaaagcattcgatgtgtccacctcagccgttcaatggctcacaaccggtttcttactagtcaacgggattatgatccccattagtgcttggttaattaaccgattcaattcaaaagtcctctacatgtcagcaatgactgtcttcttaatcgggactattatctgttacatcgcaccaacgagctcatttgcaactctattaatcggccggcttgttcaagctgctggtgttgggatttcaatgcccattttgcaaaccattatgctcaccatcttcccacctgaaaaacggggaacagccatggggatggccgggattgttatcggcctggcacctgctttagggcctaccctttcaggctggattatcgattcatacaactggcgtgttttattcggcatgattattccaatcgtgattctcgtcttagtcctcgctagtttccaaatgaagagtgttattcaactttcaaaacctaaaattgatggcccttcaattattttatcaactgtcggcttcgggagcttgctttatggcttctcagaagttggcgataaaggctggggcgatgcgctcgttctcacaaccttagcaattggcgttgtggtaattgctttattcatctggcgccaactcacgatggaaaacccattcttggaactccgcgttttcaaatcacctgtcttcacaattgccgctattttaagtggtgtgacgaacatggcgatggtcggtgccgaaatggtcttgccactatacattcaaaacattcgtggcgaatctgccttccattcaggcttaacgttattagctggttccctcatgatggggattatgatgccaattacgggccgtatttttgataaatatggtgccaaacgcttagcaatgaccgggatgttcttattgatggctgcaactgcgccattcatcttcctaacagctactaccccaatcatctacatcgttgtgttatacgctgtccggatgtttgggatttcaatggtgatgatgcctgtcacaacttccggaatgaacgctttaccaatgaacttaattagtcatgggacagctgttaataatactttccgccaagttgccagctcaatcgggacagccatcttaatcagtgtgctttctagtgttacaaaaggcaatatgccaagcacacacatggtcaagacattaccattggccttccgcgataagatgattgatgccaccctttctggttatcacgcagccttcatcgttgctgtgattttctgtgtgattggcttcatcatcacattcttcctctcttcaaagaaatctacgattaatggaggtgccaaggcatgatcgtcattacactcgttatcagcacactcgcattattcttttcatcgattttcggtcaaaagatgtggcgaccaatcttaatgaccatctttggactcacatttatcgcttcactcgttttcatcgtccaaaatgatcacaatcattacggaatgaaaactgtgaccgaaactaagacgcacacgctcgtttcaagcgcagatgcgaagggcatgtcaatgcttctctatcacccacttggtaacggcactgaaaaagtctatctttatcggaccgatgccaaccaaagtaaacccaaagcaacccaaactgaaaagacaaccaacagtgttcaaaaaaatgctgataaagcagtcttagtgacaaccaccaaataccgcgtttatcaaaataatacggctaaattctggttcggaatttctggtaacgaccacgaattcgtaagtcgtcacaacacatttaaggttgctaaaggctggttcgttctaagtgatgttcaagctaaacaactcgctaaaacattaaaaggtcaacaagcacaacttaaaactggcgcagaaaatgccggtaaacaagctgtgatggctgctatgcaagccaatccagcaatgactgctgatcaacaacaagcggttgctaaaaaagcagcaattgcctatcaacaagccgcaatggctaaagtgatggcaacattgaaataatgcaatcaaaaaatcccccacatcgtgatttgatgtgggggatttttttgtggtggaaatgtgctccgtcatccatatccttgcggttaaccctgaatgtcaaacgattgctgacgcaatcattcgccatcctgtgttaatcctcgggatatacccagctggctacgcactctgttttgaaacgggctttttgaaacatcttcctgcgcttaaccaaatttggcaaatcgacgatttcatcgtcaattcgtcaaatccagttaatgctcggaagatacccgtttcaaacgcactcttattttgaaacgggctccatcaggcatactcttccggttagttacatatcgaaaacgatcggctttgccgctcattcacgatatgccactaatcctcagagcataaccgcctgctgtcgcactctatttgcttaacaagcttgctgctgcttcgtctacgatgattgtcacgtcgtcgtgtagttgtaatgcacttgctgggacgtctgttgtttgtgggccttctactgtgcctttgatggcttcggcttttgatttgccatatgcgaacaagacgattttcttagcttttaagattgagccaatccccattgagattgcttttgttggtacatctgcttcattttcgaagaaacgtgcgttagctttgattgttgattctgttaactgcacttcttgtgtattgctgtcaaacgcagcaccgggttcattgaagccgatgtgaccgttttggccaatccctaagatttggatatcaactgggttatcagcaatcacttggtcatagcgttttaattcagcagaaatgtcgcttgctaagccgtttggtaagtatgatttagtaaatggtttcttgtcgaataagttcttcttcatgaaatagtggtaactttggtcgtcatcagctgataagccaacatattcgtccaagttcacggatgtgcaacctgtgaaatctaagtcgctagccactaatgtttcgtagaatttaattggtgaactaccagttgccaaaccgaatactttagcgttgtttgctaaaccttctttgaagatttcaaagcttttttggccgccttctacttgatctttcactttaataattttcatcatgattatctcctcatcatttaaaaattcaagtcgtttattggtatagtccaattataaacggctaaaatttcaattgcaagccttttgacgctaaaaaacgcgctaaataattggtatacctaacgtttagcgttttcacggcatttcgttaaaagcttacttttaatcgctagcaaacgcccccctttttgtgtctgctgattcaaattggttaaccaattgcactatattcattgattgccgtgcatttctggatatttttcatttgtcttacaaatccgaaatcgggtatgataatgcgctgaactattatataatatgggacagtatgagaaaaaaggtggcgttattatttgaatgatccaaagcaccgttccagtcgatggcgagcactgctcaagtcgagcagacaaaaggtctcaacgctattgacatctgctaaagacagactcgcacatttgctccatttacccgataaacgttctgcacaaccaactaaggaacaaaaaagagcctacatccaagagttgagccaatcaccactctcttttaagattaacgtcttctttgaagccattaagagtatctttctctatgggatctcaattggcttaatctgtatggcgctcgctgctggaattggcgcgggctattttgctgcgttaatgaaatccgaaccaattcctaggtatcaagtgctaaagcaacaacttgataataccgatcaagcagccggtttatactttgccaagaacaataagttcggcgcaatcaaaaccgacttaattcggactcccatcaacatccatgagatatccccttatctaaaggatgcgattgttgcaaccgaagatgaggatttctataaacacgatggggttgtccccaaagcactcttgcgggccgttatttccgatgtcactgggtttggttcacaaaccggtggctcgactttaacgcaacaattgattaagatgcaggttttaacctcccaagtaacctttaaacggaaagcaaccgaagtcttgctcgccttgcgggtcgataagtatttcactaaaaaagaaatcttacaagactacttaaacgttgccactcttggccgtaacaataaaggacaaaatatcgctggtgttcaagaagcagcattgggcctattcggcaaaaatgctaaggatctttctctagccgaggctgcctacattgctggtctgccacagagtccttccgtctatacaccatatgatcaagacggcacccttaaagatcctgaatacttaaaatatggtctagatcgtaaaaataccgtgttattccggatgtatcgtgacgatcgcattacaaaggctgaatacaaagccgctaagaaagtcgacttaaccaaagaattccaaccaaaagccgatccagccgaaacaacgaagagttatggctatgtttataacttacttgaaacacaagcaactgatattatggccaaacagttagccaaagaagccaatgtttcaactgccaaacttaacaaagatccaaatctctacaaacaatatgaaacacaagcaactgaattactcagcactaaaggctatcaaattcacagtactatcgatcaagaaatttacgatgccatgcaaggggttgttcaccaacagggcgcaacattcggacggacttataccgataccgttactgacgaagaaacggggttacaaaagaccgtttcgtcccctgttcaaaacgggagcgtcttgttagataaccgcactgggaaagtgatttcttttgtcggcggacgtgatttctccctcaaacaaacaaactacatgttgaccaaacgttctcctggttcaactatcaagccattgttagtctatggtccagcaatcgatcagaaactgattggttctaaaacgatgttggccgatttcaagaccaacttcaaggattacgcaccaaccgattacggtggcacgatccagaacaaattcattccagctgacgaagcgttagcccagtcattgaatattccaaccgttaacctttataacgctttgaagaacacaacagatccttctaagtacatgagtaagatgggcatcaacctcaccgctgatgaatacagtcaactggggatttcacttggtgggaccagtgatggggtcagcgtcttagaacaggccagtgcattttcaaccttcgcggatcaaggtgaacataccgacgcctacgtgattgaaaagattacggatcccgccggtaatgtcgtttaccaacatcacgctaagaagaaacgcgtcttttcaaaagcaacatcgtacatcatgaaccaaatgttagccggcgttttaacagatgggactgctacttcaatttacgatcaactctactttaataccaacaacttagttgggaaaaccgggacttcaaatgataaccgcgatatctggtttatcgggagtacccctgggatcaccctcgcttcatggatgggttatgacagtactggtcgtaacttaactgacaactcaagccagattaatgaaagatactggtcaaaattggccaacagcgtttatcagatcaacccaagcctcatgcgtttggaagatgatcatgaaaagccaagtacggtcacaagcagcaaagtcttgaaattaactggtcaattacctggcacggtttcaatcaacggcagctcacagaacttgaacggttcaaccgtcacctcgctttataataactggacgccaaaagcaactagctatgaattcgggattggcggttctgcccggaactacgaaactttctggaaccactatttaggttataacaacggctatggttcaattacctatagcaccgctgatgaattaaatccaactagtggctacagtagtcgtcgcagtggcaccgcagcaacaacgacaaataattacacagcaaacacaactggtactgctgctacgactggcactacaaccggtacgaattatacagcgaataccaatccaacagatacagagacaacgaactaaactaaaaaaaggcctcagttctaacgatttaaaatcgtttggaactgaggccttttttgattggtggaaacgtgctcttgtttgcaataacttccgcttaatctaaaaatcccgttaatcctaaaacctggattaacgggatttttttattaatgctcaattgttgaccgcaaccaatagcactctattttgttgattctcttgctacgatactgtatggcaataggattgtcttgtcgtttacgtcttctttgttcatcatctttgttaaaagccgcattgctacggcacccatatcatacaatggttgtgagattgacgtcatcttaggacgtaccatttcagttaacttcgtgttgttacttgtcacaacttcgaattcagctgggatttgaacgccggcatcaactgccccgttcaagacaccaactgccaattcgtcatcactgacaacagcagctgttgccccagttgttttgattttgctgaacaatgcttcaccagcactgtagctgtattctgtttcaaaaattaaactttcgtcataagcaatgcctgcttcattcaaggcatccttgtaaccgcataaacgatacttgctgttaattgggaatttcaagctaccacaaacgaacgccactttgtcatgaccatttttgattaacttcaaagttgcatctttaacagcggcaacgtaatcgatgttaacactacccacttgttcgtctggatcaattgaaccagctaacacgattggtgtctttgaacgtgagaattcagcgcggatttcgtctgaaatactgtggcccatgtagattaaaccgtcaacttgttttgccaataaggtattcaacacttgaacttccttttggttgttttcatctgagttagccaaaataatgttgtacttgtacattgtcgcaacatcgtcaatcccacgagcaagtgatgcaaaatagatgtcactaacgtcgggaatgatgaccccaaccgttgttgtcttcttgcttgctaatccacgggccaccgcatttggacggtagtcaagacggttaataacttcaagaaccttcttacgtgttgcgggtttcacattcgggttaccattgacaactcgtgagacagttgccattgaaacgtcggcttcgcgcgcaacgtcataaattgtaattgtttgtttttccatgattaactgattcctttcatttgtaaaataaaatagattatattttcagcagttttcattttacttcttgattaatttaacagagatttaaagcaaatgcaagcggtttacactaattttcatgaaatttacatttttgttttcatttgtggtttacattaccgtttacattggttgtgatatactagtgatatcaattgtaaaggaagtgctttagatgaataatcaattagcccaattacaaaattggcttggtgagaataatatggatgtggcttacatcagtaatccaaccaacatcctctatttcactggtttcgaaagtgatcctgcagaacgggtcttagccctctttgtttttgcagatcaggacccattcctatttacaccacaattagaagttgaatctgctaaaaaagctggctggaaactcgacgtttacggctatctcgatcacgaagatccatacgcaatcatcgcagatcaaatcaagaaacggaatgcgaaccctacacgttgggcacttgaaaaagacgaccttcctgttcaacgttacgaagccattctaaagcaattcccagacgcaacattcccaggcgacgcttcacgtttcatggaaaacttaaaattaattaaaacacctgaagaaatcgctttaatggaagcagccggccgtgaagccgattatgctttcgaagttggtttcaatgccttaaaagcaggtaaaacagaacaagatatcgttgcagaaatcgaatacgcattaatgcgcaaaggcgttatgcatatgagttttgataccatcgtacaatcaggtatcaacgcagctaacccccatggtggccccgaagccaacattttaaccccagatgccctcgtgctctttgaccttgggacattgcataagggttacatgagtgatgcgacgcggaccgttgcttttggcaaacccgatgcgaaatcactcgaaatccacaaagtctgtcttgaagcaaacttaactgcccaagcagcaatcaaacccggtatcacagcggctgaattagataagattgcacgtgacgtcatcactaaagcgggctacggcgaatacttcatccaccgtctaggtcacggcattggaacttcagaacacgaattcccatcaatcatggaaggcaacgacatgattatcaagccaggcatgtgtttctcaatcgaaccaggaatctacatcccaggcgttgccggtgttcgaattgaagactgtgtccacgtaacagaaacaggatcagaagccttcacacacatgacaaaagaactacaaacattctaagagtgctgattcaaacgggttggctttgaggattaacttaaaaacgcggattatgacgcttttcgtcatgattcgcgttttttggttaaccggaaaaggcagtttgaaacagcacgtttcaataagagtgcccttaattgcggtcagcaactgagcactaattaaaaaaggcagacgaaatcacaaaatgatttcgcctgccttttgttttaaagaactttataatccctagtcgttaaccattcaaactatgttacagtaatcctaacagtaagtttatgacggtggctaacgctcagaaatgaggtgatgcctatgttgattaagcgttaccttgagaaaggataacatgtcggttttcaacgcactgatgttggcaatttcggttgccatgttagttattgagattctgaaatttaatcaaaaaaaataaccgtctaaactttgacgagtcacggttattttttaccaaaaacttgccaccgtcttaagcggactgtggagaagagtcgtgttgtcgcacggctctttttctatgttttcattataacaccgacttttaaaatttgcactagtcgtcaattcaaacaagcaaaaaagcccccgctaaatcaggcttggcaggggctttttcattgattatttatcgtcagtgacttcttcttgaatagtttcaacagcggcggatgcttcgtctttggcttggccaaatgcactcttgccgtcgatcacgatatcgtcgaaatcttcttggctagcttcaaggctgccgccaaattgtgatttcaagtctgctgttttttcatcaaattgtgcttttgcttgttctttgatatcagacgcattgtcttgccaatcacttgcataatcatggacgcgattcatgtgtagctttgcgtcgtcttttaagtctgctgctgtttcacttgctaaatagtagtagtcttgtgcgcgatccattaaatcatcacctaagtccactaattttgattgtaattccttacccgtcttaggagttaacattaatgttgcaccaatggctgctgcgccaccgactaatacacctaatagaaaatgtcctttttttgccatgagaattactccttatcctttgtttgacgtcgattttggtaaaatcttaatgcacttgcgccaaccttcgaagcgaccgttgccttagcggttgtccgcccaacgttggtaacatgttccgttaaattgcgacttgccgtattcaaacttgaaacgctctcgccaagttcgccagccgctctgaaaacaggatccaagtcagcgactttcccgttcacatcgtctagcaatacgttggctttgctgagtaaaccttctacttctttagataaaatatcaacattctcagtaacaaccgtgacactcttgttggcttccgttactgtcttagaaacatccgttaatacttttgtgacttttaatagcatcactattagaaaaacaactaggaccgcaaaagcccctgcggcgattagcgccgcaatttgaccacccgtcattgatttgttcctcctacttcgttatctattacattgcctcttaaagactagaatagcattatttcccttaaccttcaattatcttcactatattaggtgccattttttctgacatttgctaaactaaagacatgctacaaaaaaggagtttcacgcatgttcacacgtttattagcggccgcaccaactccggtcgaatctgttcagaaacagaccaatatttttatgcgctacatcacttcaattgactgggataaattactcagcaccctcgttgctggattgtttcaaattatcctactctccgctttattctacctcatcaatcgcttaggtaaatacatcattaagcgcagcttcagaaaataccgcaaaactgatggtttctcaagtaaccgcatgaacaccatttatactttgatggtcaacgctttttcatacctcgtgattttcttctatctctatgcgctactcagcgttctcggcgttcctgttggtaccttgattgccggcgctgggatcttcagtttagccattgggttaggcgcacaaggtttcgtcaacgacatcgttaccggttttttcatcctcgcagaacaacaattcgatgtgggtgatatggttaaaattggtacggtagaaggcaccgtcaacgcgattggcttacgaaccacacaagttcaaagttacgatggcaccttaaatttcattcctaaccgcaatatctcgatcgtcagcaacctatcccgcaatgatatgcgtgttctgattaacattcgcatcttacccgacaccgacttacaactgttagcggcaaccgtcaatgaagtcaatgtgcaactggtgcccaaacatcctgaaatacaagatggccctacgattctcggggtaaccaccctcgcagatggtgtccttgcttaccagattgttatgcacaccactaacggcgaacaagctgccactaaccgtactttcttacaggcttacttgcaagccttgaatgaagctggtgtcccattaccttcaacacccgttacaattcccaccaaataaaagtcccctcatataaaaaggagaaccgcttatgccacttattaacgcactcaaaggcgccctaatcggcgtcgcactcgtaatacctggtctatccggcagcattttcgccgttatcgttggtctatacgaaccgcttctggcggctatcgcgcaattcaaaaaagattggcgccaagcaattggctttttatggccaatcgggattggcgctgggatcggcgtcttactctccaccaaaatcattctttggttatgcaccgcttatccactagcggcatacagtttcttcatcggtcttgtcgtcggcagtctcccattcatctggcgtagactcgccggactcaactggcaaaaagtgttaatcgccatcgtctgtggcgcaattatgctactactcacccagattggtggtcaccaatctgaatccgacatcgctatcaaacaactcactaccctccaagactttggcacgttactatttgccggcttcttctcagtatcactcatgctcatcccaggcgtctctgggtcaatcatgctcatgattgtgaagcaatatggcactgtttatcacgctgtcagtcaactactcgacttaatggtctacctcgtcacaggacgcttgacacaagccacagaagcgttcaaaagcgtcgcgctcctcttaccgttcatcattggggccgtcatcggaactgtgattgttgctaaattaatgcactacctattagcacacttcgtcgaatacgtttacgccggtgtgctcggcgttgtcattgccgccatctggattcttgcccaaaccggcgtcgcaccagcctggccagccctaacaaccgccacagcactactaggacccatcgcactcatcatcgctatgatcatcctaggcacaatcgcaacaatctacttcgacaaagcatagagtgctgttaaagcgatttgcctctgagtattaattaaaaatgagcctcaatctcgtcttttgagattaaggctcattttagattaagcggaaggtgttgcaattaaaaagcacgtttccacaaaaaaactatccacacccttcccaatcaggttgtggatagtttttatttattatagtgctttaatcgctctaagatgttcaaatttttataaatattttctgaatatttattcaatctcgtttgacccgttatttcgttagcgatgagcttttctctcgctgacaacatagaatactataccaacatctaaatctatcgtcaagtaaaatttgcataaaattcatcttttttctaaatattcaaacaacttagttatttgcaagctttgcttggcattctggacagataccatgcacttccattcggtgcccagttaccataaaccccgttagattctcagcaatcacttctacatcatctaactccggataaaaaacatcaactacttttccacagttctcacaaatagcgtgataatgcttggtctgcgcaaaatcaaaatgactggatgcatctccataagccatttcttcaataatccctaatgaggtaaacagacgcaagttattatagattgtcgcaacactcatattcggaaagcgccctgctagcgccttatagacatcgtctgcagtcggatgcatatgagtgccaatcatgaattccaaaacagcttgccgctgtggcgtgatccgtacgttgtgttctttgagtttccgtaacgtttgttgcacgatgtgactcattttgccaccacctttcgctaatgataatcattatcatatatccttattgctgtaatcgtacctttttttgacgagactgacaagtatctttgctcaaaaaaagacgttacgcgagtcccgtaacgtctttacatactttacttcaattcaggtgcatccgtctcataaaggtccattgttgacttaccattattttgctggataacactcgttttgttgttactgtctttcaacttagctttagcatctttcaccttgtagctaatcttagacttatctggtttttcgaatccttgtggtgtatagaatcgaagtagatcgccggtgattaccttgtcagaaagtgacaattcttccgttacatgttcactgattgccgttaattgcttcttctgcgctgccgttaaattcgtcagcgtcttcccattagtcgtatcgtaataggtgctgcctaccttcgtatactgtggtgtgacaaagtccccatttctaaagacaaccgtctgattgcggttaggcgcaagtaaatccgaaccaaattggatggtatcgtcattttttacacctaataggttcaataaggttggtaaaacgtcaatttcaccaccataggtatggttaacgccaccttttaacccatccatatgcaccatgaacggtactttttggaattgcgcattatcaaaatcagtaaatttatcctgattcaataacttcgcaacagccttcttatggttccctgaaatcccataatgatcgccatatagaacgagcatactattcttatctaagccagtcttttgtaaccaagctaagaattcaccaattgattgatccaaatacttagcggtttgcacataaccatcaactgtatcatcaccagtatcggtcttagcaattgattgattttgtttatccaataagtatggatagtgatttgtcacggtgattaatttagcatagaacggttgtggtaattgttcaatgtattgggctgagtcttgcatgaagatcttatctttcaagccataacccacgttgtagcctttaccttctttaaagtattgagaactgaagaagtaatcatagccccatgacttgtaggtattatcccgattccagaaacttggcacatccccatggaatgaagcggttgtgtaaccttgttgatctagaattgatggtgctgcttggaaggtattggttgtcccttgagtgaccatggcggccccttcaggtaacccgaacaatgagttttcgagcattaattcagcatcagccgtcttaccttgaccaacttggttaaagaaattgtcgaaactgagggtgttttggtcgtgatatagcttattgatatttggtgtgacttcttgaccgtcccacttataatcaattaaaaattgttggaaactctctaaatggataacaaagacgttcttacccttagccacgccagtgtattcaacattgggtgcaacccggttgtccttcatatacttcaagacactactcatactactactatcagcattagccttaatcgcattattcttggtcgtcttcacgccatcatagacagtgtatgcattcatcccaagatacttaatgatgtagttgttatcgaacgtccgggttaataacccagaacgatctgcttctgcaatcccgaggttggcaccgaataacacaacagctaacccagtaattgcaaatgcattccgcttcataaagacacggtgatcaatcttcactaacttagtagccaataagatgattagcaataaaacatcagcgaaaactaggaaatcagaatattcaataatcccagcaatactcttgcccaagttatttgataccgcaccagaacccttcattaagttaaacgttaagaagtctgaaaattcacggtaatacaaaatattcgagaataaccaagttgaggttattaaatcaataataatcaacgtaatgtatgactttcggccattcataaacaaggcaatcccaaatagcaataaggttgttggaatgggattaatcgtcattaagaaggcctgcatgccacctttgacgcctaagttaaattttgtttgatatgcgtaaattgttttaagccagaatagcgcaactgcgaaaaggaagaatccccatcgtgtgcttaatcctgattgaattttatgaccaatttgtttcatcgatacagtagcctccgttaaaggtcgttgggctttaaaagccgttgacaatctgaaagttagtttacacatccgtgaaatgaaaagcaatatgtaaccggcttgaatgccaaatattaaaccatttttaataatctgagtcgcaactgagcaaggctatcacctgcttaagtagcaaaaaaaccatcaagtaattcgatactcaatggttaattaactagtctgctaataaatcgtatagttccattgcaactaaatcaatattgtcaaattggaattgttgatgtgtgttgctgtcttcaagttcaaatgcttgagcttgaggatcatagctaacagttgcttttaaatcgccgtccttttcaaaacgtctttcttgaacctcagcgctttgatcttcttgcattgctaccagacgtttgataatcgcaactaactgtgatgattgcatggcgaagcctcctttaataactaactatcagtttatcagaaaaagagcacttctgcaccgtttatatccaattattttgcagaaggccaccataatttaattaaagcttgggtgccatcgtcgcctaattgtttatcattaacgagctgcgcatagagtttcttagcttgaagcgtagctggtaaatggagccccatcttttcggattccgttaatgcaatctttaaatccttcaaaaaatgttttgcgaaaaagcctggtgtatagtcttgcgctagaatacgtggaccatagtttgcaaggctccagttctgagcactcccaccattaaccgtgtttaaaaccgcttctagttctaatccggctgctttagcatacactaacatctctgtcattccggtcattgtgccagcaatcatgatttgattggccatctttgtatgttggcctgtcccggcagcaccgaagcgatggacagtcttacccattgcttcaaaaaagggtaatgccgtttcataggcagcttgatcgccaccgaccataatcgtcaacgtcccgttttgggcgccgatatcgccaccagaaacaggcgcatctaatgcttgcagacctttgtcagctgctgttttggcaattctctgcgccaatgttggcgtgctggtcgtcatatccaccaaaatctgaccaggttgtgcagcactaaaaattccgtcttcaccataatagatggcttcgacatcttgcggataaccgacgattgataacacaatctgactttgcgcgacaaccgctgctggtgaatcagcccatgttgcaccgagtgccacaactgcatccgctttttgttttgtccggttatacacgacaactggatagtctgccttcaataaattcttgaccatgctactacccatgacacctgttccaatgaagccaattgttggttgcatcaaaaacgcctcctactttttatcagttactcgtggtttaactgctaacgccccaatccccatgaacatcccgagatagtacgtaaacaatcgccagagcaacatgcctaacaccagtttacttgaactcgggataaaagtggcaaataacgtcttaaaactatattctgccccaccagaaccgcctggaactggaaagagcgagacaatcatgacaatcatgatgtgtaagaccatcacctctaaataattaacatgcgggatgccaagtgccaataagacaaagtatggcacactataatagaaaaaaagttgcccaagggttaaaatacagcccttgattagtttctttttctcgcgtttaaggtgtagactctccgcgtaaaaggtatcgattttggccattaacatggtccgccattccgtcacccgtttttgggagacgaaccagcccaccggaattaataaccagtgcactaactgtttcgtaaatcgattgtaatacatgattagcaacaatacggctaacacaaccacatgcacgattaatccgaaagtaatcaaaatcgacagcgtcccaaaatgcttggaaacttgcgagaaaccgatcatcatacttaataagaaattcaccagtaccatgaattggtaaacaataaacttcatcagcagtactgagctagcttgcccagcttctacacgggattgcatcaacgctaccagttgtgccggttgtccacctgaagaaaacggtgtaatcgcattgaatagttgtgcaatcaacggaatccgaagcgcattgtataaagaaaagtgttctgtgcggtcttttagaaagacgcgtaagacaagtgcctcgaaaaaccacgaaattaacatacataataaggcgaccaacagccaccaaagtttcagatgactaatatcgataaacagctgtttcaacgccagcgtgcgactttcataggcaaaaatcccacacccaatcaacagcatgactgcaaaaacaatcttattcgttctactcataaacgaccctttttcttgttattagcaacgatatgaaaaaactgttgattatatgatcaacagttttccgccagcgcgacttattttttagtatctaaatcttctaattccaataaatcatcttggtctaactttaattcgtcatataatagctgtgattgcttatagaaatgaatcatctgttccgcaaagtaatccgccgaaatagcatgcaacttctttcggcgcggtgctggatcatcaaatgcatgtggatgattcaaataattcgatacttgatggatcatttcatcttcgttcgtaaatgtcgtcccaattgaaggatcagttaataactcagccgcatatggacttgtcatgacgacaatcttgagttcagcggccatcgcttcaatataagttaatccttgtgattcagagtcactggcggagacaaaaagattcgccatatgataataatttgcaacttcatcgttatcaaccattccagtgaaaatcacgtggtcggtcatgtttaacttggcaacctgagcttctaaatcttctcgagctggaccttcaccaacaatcactaacattaaatctggtgtttgggcgactagtttgggtaacgcatcaactaagatatcaatccgtttttcataagcaacgcgactcaatgataagagcacaggttgttctggcgtcaagcccaattcggcccgtatgtcgcgggtcacttcgcgctcaaagcgactaatatcgaccccggtcggaataatccggatgggggccttcacttgatagccatttaaggtttgagaaacccgctctgatggtgccacgatgcctgacatgtgatataaaaaggcctttgtcatttgcttaacatggtatggccgtaataacttcccgtttaaaacatagtgtaaataatcctcgtacatcgtatgatacgtatgtaaacaaggaatttttaaatttttagcgacaaacttcccgatgtagcccatcgaaaattcggtctgggtatgcacgatatcgagatccaattccttagccacttgataagcgtgaaataagccgcgcacagcaattcgccgatccgtaaatgagacaaacgggacactagcaaaccggaaaatattcggttcgactgcatctttgtcaacatgtggatcggtcgttgtaaatatgtagaccgaatgcccttgtttttctagggcttcttttaatgttttaatggaggttgccacaccactgacttgtggaaagtaggtgtccgtaaatatcccaatattcaattggtttcctcctccttatctttggacatttgatttcattataataattacatcgcctagatgcaatcaatgtcactaattgtaatctattcatactagcataaaaaccgtctttagacctaaaaaacagccaatttacgttaaaaaacgggcactgcacagtttttgtgcggcgcccgtttttttattttagcgtaaccaatacgtaattgagaagattattaaacaccaaatcggtaatgccactaacaggccgttgcgaatacccataaaaaatttcatcatcccacctcatttcataaaccaatacgaacagcttgctatttagggtcactgtctactatgataaaggtaagtttaggcttcatttattaagaactaccgtgcttttacttaagaatgattaaaggagcaaacgatgcaaacttatctcattaaaaaacctcaaaaactcgaattaacctatgacgaaaatatcctaacaattcactatcccggactgtttaagaagaaacaaaaccaggatcgtgacattccgtttagcaaattaaaatcagtccgcttttttgaagcgacttatcggcatggtcatctccaaattctctaccaaaaacccaaccacgccctcgaaaaaatcgtcatcagtttcgaacccgacgataacctcgctgtgcgcaagttatacacagccttagcggactatctcgaaaaaccaaccgttgaagaagacctcagttatgttaagaccggtgatcttatcatggcttacctcaaaatgcgcgacgacggcctaatgacccacgaagaattcgaagaaaaaaagaaaagaatactaggaatggaatagagtgcgcagtaagcccgtttatcttctgaggattagcttaatcaggcggattgccgacaaagtcggtgatttgactgatgtcgctaaccggaagaagatggcttacggagcacgtttcaaagtagagtgcgacggcagacgattatacgctgaggattagcctaattcaccacaaaaaaaagggccaacgacaaacatgtttgtcgttggccctttttttaatcctcgcgagatactgagctaataaaccactctttatttctttataaaaccaattgccatcccgatgattaagatgaccaacacaataaccgtaatccaaacgtagaggtaatccacttctttagcaaatgcgtagattgataccaccacacgcaagactggcgttaaaatgaggcagaataagcccaacataatcacagcgccagccttaaatgcagcaatgccactgaaaatttcggtaaaggtcgttggaaattgatattctgaataacctgtaccgccatgaataatcgcaagtaacatgccaataatgagcagcgttgctgaaaccgccaccccaatgcgtaaaattttaccgatgacgagttcaatttgagccatctctgcttttttatctatcattaaatatgcaccccgaatcctttaagcaccatttgtaaacctgtgtataacaaaatggggataaaaatcatgcgaatcacacgtggttgcaaatactgcataatccgtgaacccacagtggaacctaccaaaattccgattgctaacggtgcagcaacgctgggaataatcgcaccgctgaagaaataaacagtggccgaagctgctgccgtaacccccatcatcaaattactcgtggcacttgatggtttcaatggcatcttcataatcgtatccatggcggtcactttgaataccccactcccgataccgagcaagccagaagcaatgccggccccgaacatcatggcaaagccgcctggtacttgttcaacagcgtagtcgacttgttcttggttggccttatcgtagtaagtgccatttaagttcaacttcttggcccacttatcttcaccagcgccgacgtgttgttctgcaactttaccacgtaatttttgaatcatgttgtacgttgaaaatagcaagaatgcgccgaataagatgaataagaatccagttggtacgatgccggtcaataacgccccgataatcgccccgacggtcgttgctatttctaggaacatcgccactcgtaagttgagcatatcatctttcaaataggcgatagttgcaccagaacttgttgcaatcacggcaataatgctggccccaatcgcgtatttaatatctaagccaatcgctagcgttaatacgggggttacaatgatcccgccaccaatccctaagattgaacccaacacgccggctaaaacaccgacggcaagtaataaaataatttgttgcatctcttttctcctcttaatgcatttttataaccgtttttcgcctgttagtgcacggagttccgttaaatcctgactgacttctaaacagcctaagtattgtccctgtggatcacgaaccgcaaaatagcgaatatagacgaacatcccgcggaagttcaaccaaaaatcagcatggtcttctcgccccgcatgaaagtccgctaaaattttctcaaccttatccacactctttggtggatggcagttcacaaccgcgcggccaatcactgcccgggttcttgggaaaatacgatgctcgttatctgagaaccactgcacaatatcgttttgatcgacaaaggttaaatcaagcggtagtacttggagaatcgccgtcaattcactaatattcatcgacccagatggtagaacgattttagcttggttatccacgccaatttcgatatggggttgtggtgcttctcgacgtgcttgaacctccgcttttggtgccgcttctttttcgtcagctaacattgccttcacaaaatcaggcatttctggttttccttcatctttttcagcgggggcttttggtacaggttgcccctgaatttcaaacggaatattagtcgctgctgctatcgaagaggggcccggttctggtggcgttgtttgggtcatcatttgcgcatccgccaacgattgcgccatcgcattcagttcttgcgcaatcttcggcacggtccgcttttcggccgccgcgatagcttcagcacttggttgccatggtaatgggtctggaattaaggtatacccgattggttggctttcagaagcaattagtccccagtcagctggtgtaaagacttcattaaccatcggaatcatgatttcttcttctttgaaaatcatttcttgaatttctttgctcatcttttcaacggctgcttcaattgcatatttatccggaattggttccgcagttaccatttgataggccgtcttcaccaacccccgaatttgatcatccacaccccacatcactttgggtggtgcagtaattccatattgatccatcaacggaaaaattaagttttctttccgtaaatagtggcggtcgatcaactgtaaatcttttaacgcttgttgcatccgcacgagataattttgatcagtccctgactgctgccatttcttcaaacatggcagtaattcatcatttaagagcgagttcatgaccaaattttctaatttcatcacagcgactgggtgtcctggctgttcttgttccggcgtttcagccccgtttgaattaatcgcccccttgaaaaccgcagcatggacattacacaaatgttgaatctccatcgggttcaagccactggcaatcaattcccgttcagcagacgtaatttcagacacatcaaccccagagaaggactcatcaaaaatccgcttagcctcttcaaacgagccaccttcatgcagcatttttaagatttccacgattcgtttttggcggtacgcactgctatgctgttgctcacacatcagctaacacctcgaatccttgtgcttctagactagcgataatcgtcgtcaaaggaatttgcttcatcttagcccctttaggcaatgtcataaaacgccccgcagtattcaaaagcgctgggttcgtgaccccatcaagtccgatttcaacaagcactggcaccacttcaggataggccgttaccaattcataaacggtttgacttaatttaatttgttttgccatcataatctccttagtcagcgttatttttcaatccagccaccatcaattggaacgacggtaccatgaatgtaatccgcaacctcactcgccaagtaaacacttaagttcgcaacttcagttggttgcgcccaacgccccgctggtgtctgacgggcaacttcttgtgccatctcaccagtccccgcaaaatcggctgcgttcatcggcgtctcaatcgcacctggggcgatacagttggcgcgaatccctttagcggcgtaatcataatcaagctgctttgtatagccaatgatggcgtgtttcgatgccgtataagccgcaccaccgccaccagcaactagcccagcaatcgaagccatattaacgaataccccacgcttttgcgcaaccattgttggcaagatcgcatttgttacaagatattgactttttaaattcgttgccataattcgatcccaatccgcactactggtatcaagcgttggtgcataagcatccaacacgcctgccgtgttgcagaccacatcgattgggccatgttctgccagcaaagtcgctaatgtcattgttaattgcgtttcatcacaaacatcaacctgcgctgtgatgcaccgactatcaacagggacttcaatcggctggcgatcaagtgctaacaccaatgccccctctgctaaaaaagcggccacttgagcgcgcccaattcccgatgccgccccggtaattaaaatggttttagtcgctaaatctgcaaaatgccccattagtcgaccaattgccaatcatcagccaatacatcacacgatgttggttggaacattgagtatgctggtgtttcggttgttttaattaataggtagggactaattgcttgcccctcgaatgtcccatcggccacttggaaaataaataattctggaccatcccagccagtccgtactacttttttgccagccttaattgcattaatcgcttcatcaaatcccatgatcattacctcatttaacttaattttttaaaatgttgaacaatcaaccttatatgatattctagcacgccactcaaatcggtaccaattaaaatcacaggcaattcgattcaaaaaaggtgtgaccaatattggtcacaccttcctgaagttaatttgatttgcgtttaaacacacgcttaatcacatcccagacccctagtgattgaactaagcgttctgcgggcacatactcgcgaatggcgcggagcacttttttgggttcctttgaagcaaaagtatacgtcccatttttctttgtttggatagcatagcggggaatccacttgcctttgaacatgactgatgcaatcacatagtcaacttcttcccatggaatttgaataaattgtcgtgcgtcacgatcattgaaaaattcaaaccctctatccccgatcatgatttgtccataatcagagagtgctgtaaacgacgtggctttaatcactaagtccacctttgtattaatcgattgaaccataatatcgactccatttccaaaaacttactttcattatacgcttttataaaaaggaggggctaggacaaattgactttgtcctagcccctcctttgttttctaaacgtgcttcagtaggcatattcctgcggttaaccaaatttgccaaatcaccgactttgttggtaattcgcctgattaggctaatcctcagaagatacccagcttattgcgcactcttttacattaagtgtaatagatggaagacaattccgactacgaataagccaagaataatcacgattggtgagactttcttcttaagtaaccacatacagaataatgttaatcctaatgcagctaacccaggaatcaagctgtccaagttgtcttgcaacgttgtcactttatggcttgtcaatgacaaaccttgagcttgttgttgtaaggctgattggatacccttagcaccgctaggtaatttatcccagtcgatgaatgcgcctttgtccaacttaacagatgaaacaactggcgtaaacttgacagatacccaacggttaaccaacgaccctaagatgaacatcccaaggattgaagcaccctttgtgatgtcttgcaaaataccaccagataaatcttctgtaatctttgaaccagcacggtagccgaattcttgtgtataccacatgaatgacatccggatagcattccaagcgataaagtaaatgattgggccaagaatgttaccactcatagcaagtgaagcagccaaagcaccgatgattggtttaacagtgaaccagaatacgggatcgccgataccagccaaaggtcccatcatcccaactttaaccccttgaattgtaacatcatcaattggtgcaccattagcacgttcttcttcaagtgccaaagttaccccgatgattggtgaagcaacataaggatgagtattaaagaattccatgtgacgaactaaagcagctgcccggtcttcttttgttttgtataatttcttaattgctgggattaatgagtaagcccaaccaccattttgcatacgttcgtagttccaagaaccttgaaggaaagttgaacgtagccaaacagaaatacgatctttacgcgttaattttaattgttctgccataattgttagcctccttcttagtagttgtcgataatatcgccaagtgggtcaccagtatttgaaccgccgccattacctgagccgccttgttttgaaagggctaagtataatagggcaagtgaaacaccgattgcaccaaggccgataagtgtcaattgtgagatagtagcaagtacgaaaccaattgcgaagaatggccatacttctttagttgccatcatgttgataaccattgcgtaaccaacggcaacgaccatcccaccaccgattgctaaaccgtctgttaaccagattggcattgctgtcaacatttctttaacagggccagcaccgattgctaagattaagcctgcaggaatagcgattcgtaaaccttgcatgataatagcgatatattgccacatttcgatcttacggaagttaccttctttagcagcagcatccatgatgtgcacgataccagttgctaatgtccgtacgatgattgttaataataacccggctacggcaagaggaacagcgatagcgatagctgatgtaacgccggcttttccttggccaccaagtattaaaataattgcagatgcgattgatgccaaagcagcatcgggtgcaacagcggcaccaatgttagcccaacctaaggcgatcatttgtaatgtcccacctaagataagacaaggtagtaattgaccggttacaagaccgattagtgtacaagcaataactggctgatggaaatggaattgatctaagataccttccataccagctagaaatgcgataaaaatgaccaaaatcacttgaatgaaattcaaatccatgattattaatcctccaatttcttctgatgttatttgttattttgtttgtctagttctgcttgtgcttttttaaggatactatccatgttaccgtttgagtcacttggcactttacgaacatcgaacttgatgcccttagcttttagtttttcaaaggtatcaatatcatcttggtcaaaagccaaaacagtatttggttgcactttaccagttgagtgcgccattgaaccaacgttaattgtttctaatggaacgccaccttcaactgctctaagtgcatcttgtggtgattcaaataataacaaagcacgttccttaccaaagtgttggtcatcttttgccaatttaatcatttgatcaactggcacgacgtgtgctttgatgccactaggagcagcttgtttaattaagtttgtccgtaattcatctttagcaacgttatctgaaacaacgataatccgtgttgggttagttgtcttcgaccatgtcgttgcaacttgaccatgtaataaacgtgaatcaattcgtgccaagacatatttgaacttaccaggtgtgcctgagtttgaagtcgtttgtgcggcttctgccttaggtgcttcttctggttgtagttcttcaggtttaacccgtacccctgctttagcttcatcaatgatatgtgctgcgatttcatgagcagatgtcatagataaacgagatgcgtaagcttcaatcaacattggtaagtttaatcctgtaacgattgcccacttatctttatgtgcttcgaacaacccattagcttgattaaatggtgaacctccccaaagatcaactaagaataagacgtcatcatctgcatcaaacgttgcaacggcagcttctaaatgcgctttcaaatcatctggtccttcatttggcataaaagtaacagcttgtactttttcttgttcgccaaaaatcattgagccagattgcatgattcctttagcaaactccccgtgacttgcaataacgattccaaccattcacaaaaacctccttaataaaaatagttgtcatactcatcaataaaacgctatcaattaatataaaaaaataatggcttaaacattattgactgagttaacagttccacgtttttattttttaaaacgctttactgaattaattttaccacaaaattctaatctgtctaatcatttttagattatctgcgaaattggtctagataatcgacaaaaaagcgctaaaagtcgcattacttaagcttttataattagataccgctaatgtttgcggtgtgctaaaatcgttttttatacaaaaaagaccttaaatcgattgatttaaggtctttgctttatttaagttcattgccactcatatattgttgatgtttttgttcatcaaattcattctctgacttggcaataatgactgctgctaatgaatttcccattacgttaacggcagttcgtcccatatctacaatccgatcaatccccgcaatgaaggccacaccagcagccggaacgccgattgtggtgattgttgctaataagacaacgaatgaagcacccgggaccccagccatccctttagaggtaatcatcaagaccaccaatagcgtaatttgttgggtgagacttaaatgaatgtgataggcttgcgccaaaaacagcgccgctagcgattggtagattgccgaaccgtccaagttaaatgaataacccgttggaatgacaaaagaagcaatcccttgactaacaccgtaattttgcactttttccattactttgggtaacgctgcttctgaactcgccgttgaaaaggctagcaccaattcttctttgaaaactttcaagatttcaaagatattgatgtgccaaatccgcgcgaccaacccagccacaacaaccacgaaaaatgccatcgttgcgtaacaaacgatgatgaaatagagcaatggtttcaaagcttcaaatccgaattgggcaattgtaaccccgattaatgcaaacaccccgattggtgctaactgcataatccagtttgtcatcttgaacataacctctgaaatcatttcaaaagcatcgatgagcggggttgcctttttaccaaaggtcgccaaccctaaaccgaacatgaccgtaaagaagatgactggaatcatttcaccagaccccaaggccgcaaagaaattcgttggcacgatatccatgatgatatcacccaagccatgatttccagcggtcttagcggctgctgtgtactgactaattgagccatgtgccaaactatgaatgtcaatcagcgctcctggtttagcaatattgccgacagctaatccgagaataattgcgaaggtcgtcatcacttcgaaatacaataacgtcttaccaccaattcggccaagttttttgatatcacccatcttggcaatcccaacgaccaaagaggaaacaacaattggtaacacaatcatcttaattaaattgatgaacaaggttccaattgattgtaagattgagatagcggtttgattatggtagaaaaaccgaccaaccactaaccctaggccgattccaattaagattcgccaacctaggctaattctaaaatatcgttgctttttcatgttttatccactcctcttgaatgccgcaaatcggcttttaaattgccaataagtccattaagtgttcaatttcgtgtgttggctgtatgtctgtcatttgatttgctagctggttcgggttataccacgctgtggcgacacccacgttctgcccaccttgcacatctgaagtaagtgaatcaccgacaatcaaagcttctgcttgtgagattccctctaattgttggaagacactttggaaataccgtggatctggtttttgatatcccaactcttccgaaacaaaaacggcatcgaaatatgtgattaatcctgaatcttgtaaccgccgatattgcgtgttggcaaccccgttggttgtgacatatagcttaatgttagctgcttttaacgcctttaacagagcttctgcttgtggcattaaatcatggcctaatgccaagttgtctaaataattttgggacaatcttggtccatcaacttcctgattaaactgttctttaaagaaggttgcaaagcgtgtgttcaataatatttcccgggttaacgtaccttcttcatactgccgccacaagttttgattaaaggtctgataagttgtcttaattgttggggtcaattgaaccccttgatctttgaataattgggccaaagcttgatcttcatccgcatcaaaatcgaataaagtattgtccatgtcaaaaaataaataacgatactgcattgtaaatcctcatttcaactaatctaaatattgtaatttgcctctaaagtcagacagtttagtataacctttttgagccatgcttgtctgtaattcgcgcgttaaacgttcaaaaataatggggccttctttttgaagcgctgtcccaacttggaccatgctagccccacataaaatatgttcaaatgcatcttgaccagatttaatcccaccagtcccaataatttgaatggctggattcaaacgctgatagaaggcatggacattcgctaaggcggttggtttgatataatcgccaccgatgccaccgaaaccatgcttaggtttaatcacaacccgttcagttgccacatcaattttcaagccatttccaatgctattcaccgaattgacaaacgctaatggaaattgattcaaaatcgccgccatctgatcaaaatgcacgatatcaaagtacggcggtaatttaacgcctaatggaccgtgataaaccgtaaaaactcgcgttagaattcgttctaccatttcaaaatcatagcccgtttgcggcttccccggtacgttcggacaagataagttcaattccaccacacctttaaaatcagaagcactaatctgtgccaacagttgctcgtcttcttcaatattaaatcccgtaatcgattgaaagtatgtcttgtctggcactgccttttgctgttgactcacatagtctaaataataaggtaggccttcattcggcaagcccattgaattgatactgcctaaacgcgttggttgataacgtggttctggatttccagagcggggcataacggtggcactcttggtcacgaaagtccctgccattgaagcctgcacttgatttaactcagcagcatcataacaataaacccccgccgcgttcatgaaacagttatcaaagtggtacccagctagtgtcgtttcagtcgaaatcaatattcttgcctcatctctaatttgtttttagtttattatacgtgaaatggcatcaaaaaaccactgtttatgaatatcattcgtaaataacgtgatataaaatccattccctcttttttaaacctaattaaccgaacaaccaataacgcagcacatataaaaatcccttggtagtgaatagagataatacttccatctattcattatcaagggattattttcgaatccattctaatcgatgacgcgctcaggattgggacttcattgaatcaggcttttttcgcttgtcgttttagaaaaataatatacccaactaagagcaccaggaatatgccaccgcatgatataccaccagttaatggttgttttttgtaaatcaacggcttggtcattagcttgatggtttttgctctgtaatattaaaccgactcgtaaaataccactaaccgcccgacttatcagtggcggttagcttaagcatttatttgcccggcttcagcgcttcattatcccagttgatggcgtactcaaagttcgaattcggtgccatcgcaatgtctgatttgactgtccggtgaagcacttgatcagagcctaacttggtaaccaccgcatcaactttcaagcctctgatcataacagcctttgtattctgtaaattagccgtaattgctgtccgatagttaacgagccccgctttgatgtgattcagtttcagatttggcgcaataatggcatcactttcggtcactttcagaccgattacataagcgaattggttacgcaatgtcacgcgattcttttgctttttaacggtaggctgcccttcacgaacaatattaaaaccacctaataaagtacaatggaacttcttagcaggcattttaattttgaaaatggcgtccttgctactgtgagccggcaccgttacttttttatcccccgtaatcagtgaggcaatattagcaggcgccgtttcatccgcttttttctttgactggctataatcaacgaccccgttttgattagtcaccgccgtattcggactgatgttaaagatatgcgcttggttatccttattttgcaccgtgatactaatcgtctcttcctgattaggtgccagccttaaatcaaaatacgttacactttgattgttttgactgctgggtaaattcgctttaacttggtaattcatactctgatcagccgcttggacggtcgttgtattcaaccacaacgcgatgccgcccattaagatgacgacgctgattctttgtaaaatatgcatccatttcatttttgaagtccctctctttaatcactttgcacatcgattaaaatttagtccgttgcagtaacgacttaacacttgcctctttcaaatttagcggctgctgccagctaattgaagcggtgtatccccaagtgtccaggtcaaatcagcattatagctgccagcataagcgccaccagcgatatccagtgtaatgccgtcagttgtcatcacatctgcccatgttcccatccctttatctttatcagcactcatcaagatttgcgcattatccaacccatcagcaggaacagtaatcgctttggctgttggtgcagcagtattcgttgaatcactagcgactactttaccgactggaaaattaatctgtgcgccttttaagatatgcgttgaatccgttgtgtctttaaattctgaacttttaacggtaatattccagccagcgccagttccccgtttatcggtgacttgtacgttaggatctttaacaatattcttaacgttttgcgcgccaccagtcagtttcaccttaccaaaatcaagtggtgttaaattatcaatcgtgatatcccctgttgcgccagttggtccgtttccgtttccatctgtccctggcacaattggtgggttagtcgttgttgtgtcccctgcttctagtgcaattttcctcgtagttgtttcattcgatgttgtcgcagcctgtacacttggtgccatcacgatatggcctaatgttactaatgataaataatcaccattttgcggtttttgaagttgtagatggtttagcgcgtacaagcgacttggtaaacgctgatatgcactatcttgtcctggaaaattataagcaacatggcctctatctgggccatcattgggtagcaaaccgtcaaaatcattgccattatggtacgtatcgaattcaacggcaaatgacttggcgattgctgagttatcttttacccaagaaaatggattccgccaaacaccaagggcgccaccggtcacttgctgccaattcttaaccttgtctgggtcattcatcattgcaaaggccatcccgtcaaccgattgcgcttttttgtcccctaaattgacatacattaaacttgtaaaattatgtgtcaaatcaatcttatactgctcttccgaccaaattgcccccttcttgttctggctatctggtgtcacttgcacaattccacctgcttgaacggaactatctaccccaatggagggtttaaagatgccatcgattggaatatgggcgggtatcgctgcttgagtacgaccactattgatacagataaacgtcaataacatggtcagcattgttgcacccagcgctaattttcttctatccatcgtctacctccatatgatttttctatttttccattcatcactacacctttggtacggtctagttatcaattgggatatcaaagattcaatcaattaatcaccaattggacttaatgttttttcattctgacaagctattaaattgtgtacaagttgttttaaaacgaatctgttaaatcttttaaagagataatccctgtctatgattatgcaacatgtgtaaacttctttaatgccgatatttgtattcggttccatgtcatcaaaatggtcgcgctggagcttcattttatccgcaattttcatcatctaattttaatctttttataattaacattggtagaatattttcacaacaatgcctatatatcagtatttgtacccatgaacatccctttaaacattaaatttcaggcatgcaaaaaagcccccagagatgattaaatgaaatgcatttaatttcctctggaggcttttttcaaatggttgtttattcagtcaattacggcattaacgaattgcaactgcttctatctcaacaattgcgccagctggtagtttaccaacttgaacggcacttctagccggtgcgatatcaccgaagaatcgcgcatatacttcattgaattcgttaaagtcatccaaatcagttaaaaaacaattggttttcacaacgttttctagggataatcctgctgccgctaacacgtgttgcatattcgtgattgcttgttttgtttgactcgctaagtccggtgccaattggccatcttttaatccgagttgccctgacataaagaccagttgatccgttgcaatcgcttggctgtatggtcccaatggttcaggtgctaagttagtgtagattttctctgtcatgctatcgtccccttcacattattaaatccgttttcattgtaatgcactttgccgcctttgacaacattctttgtgtttctttgcacaaaaaaagcgccgtctcaattaattgagacggcgcgctgggggtaagatttaggggagtgtcagctgaacgacacatttaagctttagatatattgaacaatttgcatcaagattgggacaacgaccacgaataagacggtacttgttgtgacaacgttcgttgcatatttaacgtcaccatgtgattgaccaactaagattggtaagacagccaaaccaggtgttgcagcttgaataatcaatgtgctttgttcgattgatggaattgaagttgtgttcttgaagaatagcatgatggcaatcatgatggctggtgccacaacgaaacggcctaataacgcaaggactgtatcgcggtcgaaatggattgatttcaaaccagcatcagctaagataatcccaatgtagatcaatgacattggtgttacgatgccaccgaccattgagaaggttttatcaactaattctggtaatggtaaaccagttaaaagataaattaatgcggctaagaaaccgattaatggagaaggtaataatttacgccagttaaatttgcctttagcagcgcctttttctttggttggatcatcatttgagatgaagaagaccccgattgcccatgttgaaaccgtattggccacatagtagatcaagaagtaaggtaaactcttgtcaccgaatagtgccaagttcaatggtaaaccaatgaagatggtattggcattaacgaacatattgataaatgtcccacgacgacctggccgaattcggaaagccttggttagtaaccatgccacgagataaccgagggcgaaactaattaagacgtaaatcaagccgccagataaaccgaccaacttttcacgggttaagttatctaatactgagacgaaaattgataatggtaaagcgacattcatgattaaaaatgaaattgtgcctttaaaattatcatcgaatttttttgaactccgtagccaaaaccccaatgcaatgactaagacgatttcgacaacgcttgataatgatgttagaaatgctgccaactctttcacgctcctaccgatttatatttaaattatagtgctttgtattctggttcccatttcatgtctgcgacggctttttgcacgtcagcaattggttctttattcaaaccttgatcaacagcgctttgagcaacagcgttcgcaaccgtttgtgagaagatatctagttttgtcacaggcggtaagacagctgcgccaggttctgttggatcaacgatgccacccaatgagtgagctgctttgctaatcatttcgtcatttaagactttcgcagttgacgcgattgtgcctaaaccaagccctggatagactaaagcgttgtttgcttgaccgatttcatatgtgacaccgttgtattcaacaggtgcagcaggaatcccagtcgctactaaagctttgccgtcagtccacttgattaagtctgcagcagttgcttcagctaatttcgttgggtttgacaatgggaaaataattgggcgttctgtgtgagcagccatttccttcacgattgattctgtaaaggtcccaggttgggttgaagtccccactaaaatagttgggtggattgctttgacagcagcttctaaagttgttaattcatcagcattcgcgaattcactccgtttgcgcgcaaatggtttttgttctggtgttaattctggatcatcatcaaacaatagcccttgcttgtcaaccatgtagaaacggctacgtgcttgttcttcagttaaaccttcttgtaacatttcttcgaagatgcgatgggtaatcccagcacccgcagtcccagcaccaaagctcatgtaaacttggtcggtcatcttgccaccagagatatttaaagcgcccataatcccagctaatgtgataatccctgtgccttggatatcatcattgaacgtcacgatttgatctttgtacttgttcaaaatattagcagcattgctccggccaaaatcttcaaagtgaagatacatattagggaataggtcttcagctgtttgcacgaattgatcgacgaaatcgtagtaacgatcgccgcgaacccgttcatgacggttgcctaagtataactcatcattgagtaagctttcacggttcgtcccagcatctaaaacaactggtaagacttgactaggatcaatcccggcagcagccgtataaaccattaatttaccaactgagatatccacaccttgtgtgccccagtcgccaatccctaagattccttcgccatcagtcacaacgattaatttaatttcgcgaccatcagcagcgtttgccaaggttgtcttcattgaatcaggatcgtcgattgataagaaagcagcgttttgggggttcacatataaagcactgtagttttcgattgtgtcagcgatcgttggatcgtaaaccactggcatgaattcagcaacatgttggctgaataatttaaagaacaacacacggttttcattaaaaattgacattaagaaaatccgttgttcaagcatgttggcttttgattgatattgggcataagcttgtttaacttgttcatcaatggtttgcacgtgaggtggtaacatccccgttaaaccaaattgtgcacgttcttcagcagtgaatgctgtacccttatttaaaaatggatcatttaaaatttgttgtgctttcatattaaaaatctccttttcttttatatcatgttggtcactatacacgcctcaacatttgatagtcaaaacttacatttatgataaaatagatttatatgaaacgtctaaactgcattaaacaggagtttttatgaagattaaagatttggcctattttgctgcgctaattaaattaaaaaattttacggcagtcgctgatcaattcaaggtcagtcaaccgacgatcacttacgcggtcaaacgccttgaagatgaattcgcgaccaaactcattcagcgcgatcaatcacaccaatcattgattattacccctagtggtgagcaactttatcaacatgccgcgcgaatattagcggagattgaactaacaaaggccgacatgctcaatctcaacgctactgatttgcgttttggcttgccaccaattatcggcacttactacttctcaaaattagcacaaaagctagccgctaacggcacgattcaacattttaagacagctgatgggggttccaaagaattgttggcttcattagaagccggtgaactagatgtcgcgcttcttggctctgcgacgccacttcaaaccgataccatcacagctaaagtcatcgaacgtcaccattttaagattgtagttgcacctgatagtcccttagcccagaaaccagcggtcacctttcgtgatttagcccacgagaaatttattatgctcgcggaaggattcgtgcatcccgtggtcttcaagaacttatcggacgtcaatcaaatcaaacccgaaattatttaccgcaccaatgacgttagtgtcttaaaaagtatggttcacgaaaatgtcggcatcggttttctaactgaaaccagtattacgcctgctgatgacttagtggtacttgatttattggatgaaccacaaccaatcttttacatctcgttagcctatcgtaagacccagttcttctcaccaaaacaacaagctctcatttcgaatctcgaacaagcagcgcgagactaccgtcttgaacattaaaaaagtggtggcgacaaaattaatttttgtcgccaccactttttaagtatgttttaccataaaaacgctaagacagtttgattgactgcatgattttcgtgtaattgactatgctgcgcttttttaccagtaaacttcttttcttgataggtcttcgcaccaggcgtcaccaaataccgcaacgactgtgacgatgcattactaacacgtccgtcagaatgcgtcccatcgcctaaatccccatagatattcaacaccgtaatcgatttagtagggagctggttacgcagtcccatcagttgccgataagtcgcgttcattttttgtggttggccatcctttttaacctggttttgattaggctgatcatccatcccgataatcccatcaaaatgacccgcaatattcaccatcttcgccatacggggtaactgtttatcaatcgcatggttcaataaataataaacggccgtcaagttgcccatcgaatgagccaccacgttgaatcgtttgaagctgtgctgccgattaaccgcgactaagacgtttttaaaccactcaccatcttgttgatagttaggattgcgattatcttcgaaaacaacttgcacgattggtcgtgtcgttttagctaaccaacgcccctgtaaatcaactgaaccatccttacgaacggttgcagtgaggacctgtgtcgcattcttttgttcgcgagcagctttgatcatgctatcagtcgaacgagccgaaccgccataaccatgcaaataaaaagtgggctgttcattttctgtttgcttgacttgctgcgctttttgcgtcgttgcatgccctaaaagccaccatccactgccaattaaaactcctaaaccaatgatgattattatccatttagaacgtcgcatgcgcccgaatcccttcgcttttctaattacgcctatggtaccataccattcataaagggtgtcaattaatttagcgtaagttgatcaaaaaaataacccgggtcaattgacccgggttattttgctattaatggtaataaattgtaattaatgttactagcccaaatatgattcctgggacatttgaaatgatgattggccaatctttatgtggtttaaaccaaccgtaactaaaccacaaagtcgcattaaccatcgcaacgcttggttgaatcgccgacacagggtgcccagctaaattagccataatttgttggatatatgatacgtacatcaagaaacatgtcccaactgctatctttccaagccaagccagttgattgcgatcactatgaaccgtcgctgttttttgatacctaatcgttacatcttttgttttcatcttctacctcgtcactagtcttcgacagttatagtggctacgcgatcaattaaatgtgtcccatattgaaaagcattggcataaattgttagcgtcccgtctaaagcctgctcaaactcaaacaacgcttgattatctaaccaagtgatgctagttacgcgttgcggatattgattaaacactatcttccgcgccttttcgccacccagcacaacattactattacctatattacctaaaccatagacaaacagatagtttcctttgataaaatcggttgtctcgccacttgccaagtaggtctgattttcataatgatttgtcgcataaattgcttctccataaactgacatccattgtccgacaatcttcaataacgactgtgaaaatgctggaatggcaccgtcaaattcaagcccggtattaattaataaattagcaccgacttttctggaattacaaatttgatcaataagttgcttcggtgacacatagttaatgtcatttttagcaaccccccaatgcttattaaccgtcatcgaggtttcagctgctaaatatttttgtggtccttgatgattaatcgattgtggattaccccgttcaaatgttaaaacatcgatcagcggattgcgaatcgcaccttgttcctcaagaccagtgttattagtctacatcagatattagttaatcacttattaagttaaaactcataagcaacacaatctatcttatcatgtataaacccgaatgtcaacaactttttttaagtaatattcattcaacgttttgctacatgctcatctctcgacgacatagaatatcttaccatcctagtgggacaacgtcaatcactaatttgaaaaaaattcaaaaaaattgaattcctgtataaatatcgaaaaaataattcatatcacccggattctcatccctaatctgcgctattgattatccctcataatacttttaaactgctatttgttccaattttatccaaattggtataggtaaacaaaaagatcctgcaaaattcgcagaatcttcacgtcctaatagaagtcttctaggttttcatagtctaatatcgcaatctttcgaccgtttcgttcaattagcgcatgactttctaactgttttaacttacgcgataaggtttcaggcgttgttccaatatatgttgccagttcttttaacttcatcggaatcatcacttcagtttctccgctcgctttagctaaatcaagtagataagtcacgattctggattcaactgactcgatattgattaagttcgcctgtttttccaaacgcgtcatcttatcagtagttgcttctagtaactttaaactaatttcgggataggctaacagtaactgttgaaaatcactccgcgataacgtacagattgtactatcttgcaagacctcaccgtacaacggctcatcttccgttttaaaaagtaacttttctccttcaaaatcaccgggttccatcatgcgtagcagttgctctttgcctgctgtagagagctgatagaccttaatgctccccttagctaagatcactaaccgcttctgatctatcgggctcatcaccaacgtcccttttttaacgcgttcatgatgggtaactgccgaaatcttgaccaaactatcacggtctaaatgattaaaaatcggtactatctcagcacaaatatgttgttcgtcagtcacctagcccacttccctctatcttaatcgtcgtcttcttcatctaatccttcgcgcgctgcttttcctagttggctttgcaattcacggatttggtgttggttgtagcccattaaagaaaccatatccgccgctaaagcaaatcgttcttctttttccgcaagtttaatcgcacgggaaacaaatagattagcagtattatagtccgcaaccatttccgcaatcatcgctggcatctcccagtacttaatccgcggctcttctgtcagcatcccatactcggtatactcagcttgcgtcgtcggaagcacttcaccttcgtctagtagccgttcggccgtcttgtctaatagcatatcattttctgcaagcaatgtggttaattgcgctttaaaagcttggttattgattcctttagcgtaccacttcatttgacggagtttacgccgttgaatcgttaagttagccatcacatggccgatcatggcacccgcggttggtgtatggtgatcaacatcagcttgtttaacttctgcttggtaacgtgtttcgatttcttcattagataacatattaattgccccctatttcactttgatactttgaacgctgtagcccaagtcagttacagcttgtgttaattcatctgggtttgtcacggcttcatcgtattctgctttcactttactagcattaaagagaactttcactgattcaaccccatcttgttgactgacacccgcttgaatcttttgcatacatgacggacatgatagctcgtctaattgcatcaccaattttgccatttcaatgaccaccttttcgtttgattactgttactatatcgcgcgctgcatgattaaaaattgaccgccatcaagtttagcgaactttaaaccgaatcaggcgcatcgcattgaaaatcacgaccagaatactaatctcatgaacaaacatcccactagccatctgtacccagccaagcatcaggccaagcaataacaatccgaccgttccaacagcaatcacaatattttgaactgtattacgtgccgtcgccttcgtgaggtaatcggcatacactaattcggataacgtcgattgcattaacacaatatcggatgtctcaatcgcgacatctgtcccagaacccatcgcaattccaatgtcagccagtgcaagcgaaggactatcattaatcccatccccgataaaagccactttttgaccgtttgcttggtaggtcttaatgaattcaaccttctctgccggcaaaagattcgcgtggtattcagtaatcccgacggctttggcaattgctgcggccgtctggtcattatcgcccgtcaacatgactaaatgtttaacgcccgcttttttcaaacgcgttaatgctgccttggcttccggtttaaccgtatcagcaatcccaattaataaaacaacttgttggtcaactgcgactaacacggttgattgccctgctgtttgactggccgtgatcgccgcaatctgcgcaccggttaaccggatccctgcttcagtcatcatcttggcccgcccaatccgaattgtttgaccagcgacttcagcttgtacccccaaccctttgagcgtttcaattcgttcaatagttggtaagtctgtcacccctcgttcccgtgcatactgcacaatcgcagtcgccagtggatgatctgactgtgcttcaaccgcggtagtcactgccaacgttgcttgttctgccgctgtataaaattgcacatgtgcaactgccgtgtcccctttagtcaatgtcccagttttatcaaagaccatcgtatcaatgccagccatcgcattaacgacttcgccgcctttaatcaaaaccccatgcttcgcgccattgccaatccccgccacgattgaaactggcgcaccaattactagcgcacctggacaaccaagcaccagaatcgtaatcgcgagtttaaagtcgcgcgtgattaagccaatcgctaatgccaacactaaaacggccggtgtgtaatacgtcgcaaaacgatcaatgaatttttccgcgggtgacttactatcttgggcctcttcaaccaattcaataatttgggcaaaagttgtatcatccccaacctgcgttgcggtaaccgtcaatgtcccgttatccacaattgccccggaataaacagcatcacccactattttcttaacgagttgtgcttcgccagtgatgctagcttcattgacataggcactaccttggacgacttgcccatcaaccggcacctgagcgccagctttaaccaatacttgatcatcgatttcgacatcatcaacatctaccgtcgtagtagtgccatcggccgctaacacttgtgccgtttgtggcgccatttcagacaatgcgcgaattgattctcgtgtctttttcaaggttcgttgttcaagatagctcccgaataaaaagaggaacgtgacaatcgccgattcattgaactcaccaatgattagcgctcccaataccgcaatcgtgaccagcaaatcaatgctgatgactttcacttttagcgcttgatacgcctgcatcaaaatcggtgcaacccccatcattgacgcaaccaataacagcccttgcatcacaattaccgccccaccaagccaataccagctataggccactgcaatcaatccgccaacagtcagcgcaatctgattcttcacggattgtaaccatctttgaaatttcatttaaaatcccttcttcctaacgattgtctttagtatagaagaaagccgattttaagaacttgatggttatcaagtttacccgaatataacagacaaaaaagcacaatcaacgattgtttcgtcgattgtgctttttcaattcgattaggcttcaaacccattttgatcagcgacttgcttgaaccaatgacctgattttttaatcgcccgttggcaatcatggtctaagtccaccgcaataaaaccgtagcggttcttataggcgttggtccatgaccagttatccatacacgtccacatatgataaccgagacagttgctgccttcttgaagggcttgatggacatacttcaaatgatcctgtacaaattcaatccggtagtcatcattaatctggccatccgcattgcgataacgttcttcgccttcaacgcccatcccgttttccgaaataaagcaagcaatgttgccgtagttttcgcgaacgtttttcaaaatatcgtaaatcccacgttcgtagatttcccacccgcgatacggattgactttcttacccggcatatcgtaattgtcgaaaaaatcatccggcatcgggccgtttgtatggtcgattggggtttccttggccttcacgcgccgtggttgataataattaatccccaataaatccacagtgttcgccttaatcaatgctaagtcagctggttgatagtcaggtaagatggctagatcttttaaaatcgcgactaaatcagcggggaattcccccttcacggcaggatctaagaatgaacggttgaaaaaagcatctgcaagatcctctggcaaactaaagattgttttaccccgttgtttccactaaactataagtagaaagcggggtattttttttgccaaaatacgaagaaattgccaacattattcgacaacggattaaacaagggcgctatcctgctaatacgttgttacccaatcaaaccgacttagttcaagaattcgatgctagtcgaatgacgatcaaaaaagcaatcacgattttaacgatggaaggactcgttctatcacgacgcggcgctggtacaaaggtgttagaccactctttttggaataaatcaacggcaccagcggatcaataccgtgggatgtcacgcgacttagccgacattggtaaaacactctcaagtaaggtcatcacgtttgaggtgactttcccaacgcctgagattaaagatcgcttaatgcttgctgatcaacagcccgtctacaaaatcattcgactgcggattatcgacggcgttaatagcgtcctcgaacatacctacatgccagtgagtctagttcccggattaactgatgatgttctcgcacagtcaatctacacctaccttaaggagaccctacacctcacgttcgcgggtgcctttcgcaatattcaagccgacaaggccgatgaatatgaccagcaatatctggactgcgccccaactgatcccgtcttagaagttgaacaagttgtttatctcgataatggccaaccgattgaatactcaagaagtcgcaaccgttatgatcgccgcggttatacattcttagacgttaagaatacttaattgcactaaaaaaagcctgccagcatttagctgacaggctttttctagtgattatttttcgacatcttgtaatttttggttgtcgtctaattgtgagcgaccaccgttgccgattttttgtaaatgattcattcctaaccataatagcaagagtgctacgacgatgaaggctaagagaacaaagaatgattgaacaatttgaccggtacctaaaccagatgtaattgcttctctgagccctagaattgaatacgtcattggtaagaatgggtgaatgacgttgtagaagtggttcgtgatttccattgggaatgtaccacctgaaccccctaattgaagcatcaagaggaccattgctaagaaacgaccaggattatcaaatgtcattgataagaacataatgatcgacatcgaagcaagtgagaaggtaattgccattaggaagaattgtgctggatgatcgacgtttaatccagcaaccatcattaaggcaggttcgataattgccatcccgacagcgactaaagcgccaaccgtgattttacttaagaaccatgctgttgatgattgaccagtcattgagatcttccgaattggataagcaaagttgaagacaattgcgccaacgaacaatgctaatgaaagaacgtaaggtgctaaagcatgaccgtagttaggcacatagctatagtttgaatgtttcaattcagcaggtgcagcgaacatatccgctgtcttattcgttaattggatatcgttaacttgttttgcgccacccttaagggcagttgctaatgtcttgttaccatcagttaactgaccagcaccgtcgtttaacttagctgagttagcagctaattgacttgtaccatcggctaattgaccaacaccactcgttaacgttgggatcttagcgtttaattgaccaagaccaccgttcaatgtttcagaacctgttgccaattgactaacaccacttgttaattgtggtacttggctattcaattgaccagtaccagttgctaattgttttgaaccagcagctaattgaccaacaccgcttgtcaattgtggtacttgaccgtttaattgcgttgtaccagcatacaaggcttttgaacctgttgctaattgtccaacaccgcttgtcaattgtggcacttgaccgtttagttgtgttgtaccagcatacaaggcttttgaacctgttgctaattgtccaacaccgcttgtcaacgctggtaccttactatttaactcgtttgtcccatcacttgcttttgatacgccagctgtataggcgcttaatcctggaattaagcctagttgactcggagtcccaacaaggcctaatttaatttgtcttaagcctgcattgatagtatctgttgcttggatagcccccatatctgaaggtttatcactagttttagttaaacctgcgctaacagtttttaaaccacctgttaattcatcaattgcttgatctacgcccgatttaagttgaggtgctgcaacatataattcatttacaccttttttcaatgcttgaagacttgtcattaagttagtcatctgcgtttgaactgattttagatgtacaccagtatcttcagtattagttttaatcgtatttaaatctgcaccagatgaggcaagttgattagctgtagcagtaacactagtccccgcactttgaagtgcattatttagtttctgtgctaaagctggatcttttgataatgctgctttaatttgtggatcagaaactacttctgtaatagcttgtaattgcgcaccagtgttagcaacttgactagctgcacttgtacttacatttttatcatatagtttactattaatttgttgtaatgattgtcctgtacttgtagcatcagttgctactgccgttaagtctgttgttacttgttttgaaattgcatctgcttgtggactatttatccccgcgttaagtttctcaacaccagtctgtaattcgcccatgcttgatctcaataaatctaacttttctgatttactatctaactgatcatcaatcatattagcagcagcagataaggcgccacttaattgttgactaccatcgattaactgatcaacgccgccatttactttaccagcaccagcaactaactgatcactattactatctaaggcatttaatccactctttaattttgtaacgccaccggctaattgtccggtaccatcatttaacgtttgtaaacctgtgtttaattgaccagcaccgtcatttaaatctttagcacctgaagccaacgcacctgttttactatttaacgtttgtaaacctgtgtttaattgaccggcaccgttgttcaattggcttgcgcctgaagctaatgcgcctgtcttactgttcaatgtttgtagacctgtgttcaattggttggcaccgctgtccaattggctagcacctgaggctaatgcgcctgttttgctattcaatgtttgtaagcctgtgtttaaggcccctgaaccggctgctaatttttgaataccgtctgataaaggtgtcacgctggtcttcattgtcatgacaccatcgttgaccttatcaacaccagctgtataagtgttcaagccatctgaaagtgtgactgaacccttcgttaacttcttagcccctgaagcggctgtgctgaagcctttaccagctgttttaacttgtttgaacatgacttgagcataagcctttgtcactgtttcacgtacttgggcgttcaattccttggcacccatttcactgataacttccccgatgaagttcaatgaatcgtttgtttcatattggatttgcatctttttaggattcttatccaagactgttgcggcgtttgctgaaaagttcttaggtaaagtaacgactgtatagtattccttatccttcaaaccttgcttagccttcttggctgaaacgaaacgccaacctagttggtcgtttttctttaattccttaaccatatccttaccagcactcaacgtttcaccgttgtaagttgctggttgatcgttatttacgacagcgactggtagttcaccagtgctaccgtaaggatcccagacagatttcaggaaaaagacactgtacaagaacggaataaacacgattgcgattaacgaaatcatgatgattttattcttggcaatgaacttaaattcattttgaatcatcttcatgctaaaatctcctttaattatataagttgcttaattgattacattcaatatccacgataactaaattagtctaaccttttttcatttaaatttcaagtcttatgcgccaaactattctctattcacaactgtttctaatctagcaaaaaaagacggtcgttatttatataacaaccgtctcccttatggaagaaacaaatgacttcctattaaattaattattttgcttcaatcttcgtcatgccacccatgtatggtaccaatggttctgggattgtgacgctgccatcttcgttttgatagttttccaagatggcggcaactgtccggccgactgctaagcctgaaccgttcaatgtgtgcaccaagttgacgtggccatcttcgtcacggtaacgaatttgggcgcggcgtgcttggaagtctgtacaatctgaacaacttgagatttcacggtacgtattttgagctggtaaccaaacttcgatatcgtatgtcttagctgatgtgaagctggcatcgccagttgccaatgtgatgacgtgatatggcaagttcaatgcttttaagatattttcagcatcggcggtcattttttctagttcattgaatgattcttctggtttcgtgaatttcaccatttcaactttgttaaattgatgcatccggattaaaccacgggtatcacggccggcacttcctgcttctgaacggaaagctggtgataaggcagtgaagtagattggcaattgtgcgccatccaagatttcgtcgcggtagaagttcgtcaatggcacttcggcggttggaatcaaagtcatgggttcgccttcgttggtcattgtgtaaacatcttccgtaaacttaggaaattggccagtcccaaacattgattcgccattcactaagtacggcgtgatcatttcttcatagccttctttagcatgttgatccaacatgaagttataaacggcccgttcaagacgtgcaccggcacccttatagtaaacaaagcgactacctgatactttagcggcgcgttcaaagtctaagatgcctaatttttcaccgatatcccagtgtgctaatggttcaaaatcaaattcacggggtgttgaccatttgcgttcttcacggctaaaactttcatctgggccaacgggtgctgaatcatctgggaagttgggtaagcggactaagatgtagtccactttggccttcacttcagccaattcgctatccaaagccttgatttcggccccaacattcttcatagcagcgatttgttcagtcgcatcttctttattgcgtttggcaacggcgatggcttctgaggcagcattgcgatttttcttcaattcttcggtcttcacaattaaggcacggcgtttttcatctaatgcgatgacctcatcaatttctgcagcttgaacaccgcggctagctaacttatcctttgcccattggacattttctcgaatgactttaatatctaacattgcactctctccttttaatgatctttaattaacaacaataaaaaaagccttctcatcccttaattgggacgaaaagacttcaattcgcggtaccacccaagttcacccactacaaataataggtgccctcaattactgataacggccaggaaccgtgtagttcatcactacccactattgcgctggaatgctggattcaataccttccaccaaccggtatctctctgtcaatccatataggcgcttattcacgtgtttacttcttaatgtaagaataccgcatttaatctttaaattcaatcatcaatagatgatttttgaatccatagaccccgtaataaaccgagcatacgtccaaaatgatcgctatctgcattttgatgccatttaaacatcaccgcttctgggttaacgatgccagttaaatcaatgatcgaagtcgtaaccaccatatcagcatccattaaatccgcgtcagattgactaacatccgcatacaaaacactattcagtgcagtcatcaaaacaaagtacccgaggaaggattgttccgtcacaacgacaaccttcactttattcatcggtgcaaaccgttgaatcatctgacgcaagacgttgtagtaaccactgaccaattcttcacgtaatttgactaagaatgacactttcggattgattaataagtaatccaccgtatcatcaatattttattttaggacatcatttggcttgagatattcaacactttccatcatttggtcagcgagcaccgatgtcacatcttgtttaaacatgtacgtggtcatcgtcatcgaaatcatcgtttgcacgaaaccttgataattcgcatcgtctaagtttaggtatttcttgatatcaaacggaatttgatcaataaaagcttctacaaattcgtaaatcactggaatataccgcttgtatcgcgtttcgtaagattccatgtagggattagcatcctgaatctgaatcggtccaaaattaatgatgtcatatatattgaatgattcagccatcgcttcttcttgggtcatttgtgcaagaatgctcttgatccgtaaagcttggtcttcaaagggctattttagatattcagaaaccatattgggaactggataacggataaaatcgccatctagttcagttgaaaccgtgtgaccttgtagtaatcggaaataggttaggacgattgaatacgcccctagttcacgggtcaaaatattggttttttccaattggaaccgatcaatcgcaacatcgaacgccttaagtgcatcgtctcgtttaacatcttcaaagggccaggtatgcccttccgttgccatccagaataacatcgttaagactaaatgaattttattttcgtcgccttctaaccgaagtgaatcataatacatacggatatcaaatgagcgaattaagtcgcgcaccccttttaaatggcgtagcgccgttgccttactcgtatcatgggcttcccagaattcttggaatgtaacggtctcacccttgagtaagattttgataaaatcaaacgcttctgacttattcactaataaatagtgataggcatctgttggaacgctgaacaaggttttaatatcatcaacatccggtccgataatttcctttaggtccccaataatgctcatgtacatattgtacaagctaccgtaactgcgatttaatagcattgctacttgttttagattcacatcttcaacgagcggctgattattacgcgatagttcaatccgctttttaacaggcaactcatcccgttttaaaccaacaatctccattaataaggcgtacttatcattttccgcttgcgttagaaaaatactctcacttgcgttcaaaccgattccccctagtaaaaatccttataattagtaattaatcctaccataaattgtgcaaatagtaactattgcgttgtttaaaatcaaagattgctttttacgtcagaaatgctagaatatttaagtgacgtttggttgtaaaacaccatatgttgtatatcaacaataatttaaacacattttatggtcaaaagagggagactgatgacattgctcgtacttgctggcacaattggtgcaggaaaaactagtttaactaaatatctatctgatcacttaggcactgaagccttttacgaatcagtagacgataatgaagtattaccattattctacaaagatccaactaaatatgcgttcttactacaaatctatttcttaaacaaacgatttgatagtatcaaacaagcatatacagatgataacaacatcttagaccgttcaattttcgaagattcattactcttccacttgaacgctgatcttggtcgcgctaccgcaaccgaagtccgtgtctacgacgaattattagccaacatgatgcaagaattgccatttgctgcccacaagaaacgccctgacttattaatccatgtacgcgttagtttcgaaacaatgctttcacggattcaaaaacgtggtcgttcatacgaacaactagaagccgatccaaccctctacgactattataaagaattaaacagccgttatgatgcttggtatgaagcctatgacgaaagtcccaagatgcaaatcgatggtgacaaattagacttcgttgaaaacgaagctgatcgtcaaaaagtcatcgaaatgattgacgaacgggtgaaagccttaaacgcagaacaagaagcaaatatgggtgcctaattgcacaaaaaaagccgttcgacaaattgtcgaacggcttttttattatgcttgggtacctttttgcatccataattcatgaataatgccatacagccgggcatagtgatcgctactagcatttaagcgccacgtaaaatacaacgcctccggattaacgttttcgggtaaggcaatgctcgacgtccgaacaatcaggtctgcatcccgtaaagcttcatcggtcgtactaacagcgacatatttgatattatcgagtgctgttaagatatccatatagccaatgtaatcttgctcaatcacgagtgcgaccttcacctggcttacaggatgatactgctggatgacttgttgaattaaattatagtaagcctttatcaaattctcccgcccacttgctaaaaaactaaaagctggttcgaataagaggtaatctacggtatcactaatttttttatggagtagttcattgggttttagctgcggcatacgaatgactaattcattaaaaacgacagaggtcgcgtccatcccaaggatataggtcgtcaccgtagtcgttaacaacgcatttttgaaaatatcatatgtgtgctgcgaaatctctaactcatgcataatatcaaatggaatacgctccaaaaaggcagtcacaaaacgatgaatttctggtatataacgttcatctgcccaatcagcagtcaccttagtacttgttattgagcgtaacggtactggacaataccgtaacaagaagaatagtccagcggcttctgaacgcccttccgttaacgttaactctgccaaacaagttcgtaatcccgttgattctttagtgaaatcggctgcaagtaaatcactgattaaattaggatagggataccgaatagttgctaatttttcatcgggctgcacgactgcaccggccatcacccgataataagttactgccagaatcgtggcgccaatttcgcgcgttaataggttaggcttttgcaattgaaattcatcgcagacatagtcaaaggccgacaaaacacattcgtgattgatttcttcaaatagccattgatgcccaccagacgccaaccagtataaggcggataagaccaatcggattgtcttctcatccccttccaaccggattggttcgtatgaaacccgtaagttgaaggcgcgggttagatcgcggacttgcttcaaatgacgtaatacagttgctttactactatcatgctctgctaagaaggttttaaacgatatatccccgccccgcaatagaatctgtacgaaatcatagatgtcagaatgttgtactaaatataaatgatagacatcacttggaattgcgaagagtcgcttaacatcatcttcctccgtccctaatattgcctgcagatccccaacaatactgacatacgtattgtataagctactataattacggtctaacaatgttgccacttgcttcaaattgacgtcatcgattagtgcttcgccttttttagccatgctcattcgttttttaatgggtaattcatcccatttgacattaataatatctaagaaaagagcatacttatctttttctgccgatgttaaataaacactattggtatccacattgcttaaccccttgttccaaataattgatatatattttaccatcaatcgatattaaagcataaccattctacagcgatatttgttgcgtataacaaaaggcaatgcgttattaacacacaccgcctcaaaagctgaaaataatttcgtcatcagctctaattaaacctgacacgctaataacttaaatcaccaattgccatttcaaatcagcattatatgggccaatctgataagcatcattataaggtagtgataactgtaactgactttgtttccaaccaactgtggttccataactcgttaaatcttgctcactgattggccgctgtagaatcccatcaatccattgattatcaggcgactcattagttaatgcttttgcatcactatcatttaagcggtatttaaaattttcttgcatataaaagggattattgggtcgttgatttatccccagatagcctagttgtaaatcaaaatgactacacaacggattacatatgactactttcggcgcttttggtgtaccagtatctgccacttttagttgtacacttggtacctcatttagcgcaatcgtccgattagtacccccctactttgacccaaaatttcgtcatcaaacgtaattgttttcgggatgccaacctctactgccccgtttaaagttaatttaaattggaatttagcgattggatttaaatcatcatttgcaataggtgcacttgccaccttttcagacaacgtaaactcaatgtcgcttgtccgcatgacatcacaatgcagcccttgctccgtagtagtcggattctgactagcattaattagctgtgccataaagctctccgataaatgcaactgcgaatcggttatcaccggttgccacactgcattttgatctgcattaacacgatagtataacccaaaagaatcaggcgggttaactaggtcgacttgtcctgtaattccgtactgcggggccgcatgcagtgtgccatccgcataattaaactgcgcatggccattcgattttacagactgtgcatttttggcacccggatcagctaatgtgacagagcgaatctcaggcacctgaatgcctggaaaatcgtggtcctggccaaaaacggctttatcatgattgggtgaaatcggagcatcgggtatgtagattagttcacgaataatactttcaagtcgcgattaaattcagtatactaaatttagataaacaaacttactggaggatagtattcatgcggacttggcaaaaatggactttgattgttctggcactcttcttaataccaattatgtattttgagaaccaatattttatgagagagcagtttaaacagtcgcaaaagaatatgcagcagtcaattttaagtgattttaatgaccaagcaagcggtcaatacgcggcctttaaaatctacgctgcagccaaaccgcatggaaaaatctattattttgtcccacaaaaccaaaatggggccaatatcgatttacaaaaacaagaagtcgcactcggtaatcagctttatgcaaaagcacacaaagaatcacccgacattgaccatatcacgttgtacgtcagttatactgctaagaacttgcaagacaatacgtatgcttttaagccaaccgccgaggcttatggttttgtaaaatcacggtttaagacccgttatcaacgcttattttcacaaactggaactgaagccatctatgatatgcagcacaatacaacatcggtttcgtttaaagatttacaaaaagatagcacaacaattccgatgattcgtcaacttgcaattaaccaacaattacaagcccatgattatacccccgaacaacttacacaattggaagcacttgatttcccgggaaatgatcaagcaaccaattttgactttacaacagatggtctaacattgaaattcgcaaagaatcctcttgatattgaaacaattgccctgccaatggcaacggttggtccatacctcaatcccaaccttgtcccagaagacaatcaaatgccttccaaaaaaggtggtgctaaaaagattgcactcacctttaatacgacattaaaacctagcactattacgagtgtcattaatcaactaaacgatttaaacatcaaagcaacttttttcactactggtaaagcagctaaagaacatccggatcaactgaagcaattactcaaagctggccatgtcgttggcacccaagcgtataacaacgatgatgacttggatacaatgagcgcgtcagaaattgccgataacctcaagcaaaccgatgccgcctacttcaaagccagtggtcaattgccacacttattacgggtcacaaccgaaacccctagtacggaattaacaaccgctgctagccgggcactaatcgcttggagtgttgattcggaagattggcgcttagatattgatgcgccgacaattgccaaaaatgtaaatgagcgtattacaggtggtgatcttgtcctactgcacacaagtgaggcaacgattaaggcattacccgcaattgctaaagaacaaaccgctcaaaaacgacatttcgtgacagtcaacgagctcttcaagcaacgattaacaccttatcaacaatatttcaaagctggtgatcaacgctcgctacaataacgcaaaaaggcccgacaacttaaattgtcgggcctttttgtaatctaaacgtgctccgtaagccgcacgctatttatgttttgataaatcaacttcttctagtggaatcatcttagttttgtaccgtactttatagtaaacatatagtacgacaaacaatggaatgctcatataactaatcccaatcgctgtccaatcgaagttcttaaaggcttgaatatcttgccctgcaatcaccaataaacaaagcacgaatgcaaaaatgggaccaaatgggaaccaacgtgcatgatatttcaattcgctcaactgatgaccttgtgccttgaacgcacgacggaaacgataatgtgacacagcaattcctaaccaagcaataaacccagtcaacccactagctgccactaagaataaataaatccgagttccaaaaatacttgtcacaaaggttaaagctcctatgattgttgtaccaatcagtgccattactgggacgccacgtttgcttgtcttagcgaaaattttagctgcatagccatcttcagccattgaccacaacatccgggatgaagcgtacatccctgagtttgccgctgataacactgatgttaagatcactgcgttcatgatgctggctgcagaagctaacccagcccgtttgaacactaacgtaaatggactaacagcaatattcgtttcactcgcgcccaacaatgagtggctatcataaggaattaaacaagcaatcacgaagattgaaagaatataaaatagcagaatgcgccagaaaacttgtttaatggcctttggaatactcttttctggggtctttgattcaccagctgtaatcccaattagttcggtgccttggaatgagaagccagcaatgacgaagacactcaacatcattggtaacccaccaacaaatggggccttcttataagtgaagttactcaagccagtatgatggccacccataatcccgagaatcgttagtaacccaacacctaagaaaataatgaccgtaatcactttgattaacgcaaaccaatattccgtttcgccgaatgatttaacactcgtgatgttaatcaagaaaattaataatagtgcgactaagctaaaaatccaccctggcatatcaggaagccagaattccgtaacgagtgccgcggtactaatatcaaccgccaacgtaatcgcccagttaaaccaataattccaccctaacgcaaaaccaagggctggatcaacaaaccgcgttgcataggttgagaaagaacctgagacaggcaagtacgttgccatttcacccaaactggtcatcaagaagaagaccataatcccaatcccacaataggctaacaatgcaccacctggacctgcctttgcaattgctgaaccacttgtcacaaacaagcccgtcccgatactaccgcccaacgcaatcatcgaaagatgccgcgtctttaactcccgcttcatttcatttcctgccataatacttcgctcttttctctatgatttcaagaaaaagccccaaccacgttctagcaaacaaaaaaacagtctttttgtctgctaaaaacgacaaaaagactgatagccttataatatccgttgatagcgccccgtaacatttcgttacgacagtccttgatttattcaaccaagtcccaacatcaaaatgaataagcaaattgacatttcggcaaattcccctttaattatccctcattactgcttagtcagttcagggtaacgactcatggtttttgcgacctcttatcttgttagaaatgagtatacagaattcacacaaccacgtcaattatttccattaaaaaaccacgattatttcaatcgtggttttcattttgcttattgttctttatctttgcgtgatttccgccataaaagaattatcaatagtaggataatgacaatcataataccgataatgacatataaccaccagttattgttctctggtaattcaacggccttatcgttatattttgcaacttcctgacgggtaatctcgcttagtattggttcctgtataatcaatcaatccattttcattggttgtcgctgtcgtaggggtcacatcgaccgtaattggttttgttccactattttgaacccgcacaccaacttcttgttttcgaccaggagtaacttttaaatcataatagcccaactccgtatccgtttgattatcaggatagacgggcgtaaccgaataagtcactttctccgcctgaactggttgatgactaaccatcaacatcaggccaaaagtggcaaccaccgctaataacaatccaaatcgttgcttcattcgtctcattctattcgctactccttctaattcagagtacgttttatgtaataaaataataagttttcagcaaatatatatttttaattttggtgttaattattttcttcactattaatcttaatcctttgttaacaagtggtacggcgttaattggatatgccattgtccattttttaaataaattctcaattttctgaaactatcaactaatcaattgaaaactaattttcaatttcagcacaaaaaaagcaatccaacaaccggattgctttcactctattttaaatttttaatgatcttctggatgagtaattcacgctgttcggctgattgattccaatcaatcactggaatggcttgatgcccaattgtctcaataatcaagccagaaacagtttgccgttttaactcgttcgcccatagcatgtccgccttgtggaacgcagcgttaataatcaatgttccttgtttagcaacgggttggaagtcattgaagaccgtatccaacttacccgtatctggataagacttaatttgtccttccgtggccaacacaacatcgtagattgaaacttcatcggctggccgcgctagtgtaaaaccaccactattaccagaagccgatttcactagcccagccactactaacttacgaataattttgcgtaggtaagtctgtgacccgcctaagcgatgatgaatgacttcagacgaaattgtgtgttcaggatcttgcgtcgccaaaagtacgataatacaagttgcttgttcaaacgcccgtgttaaatgcattagccctatcccctttttaacagtcgcgcactacgcctttcgcgtcttagtgaatgaaccagaggattgacctgcgtcggtttgtacctcaaacccatatttttcaagaatgtgtgcaactttcttaaaatcatctctatcgaacgtactgatattaccatcaattgtttcaatttccaacttattcgctaaattacagaaggctttcactgccaattgtgctaaaccaagattttggaaatcataaacagctaagcgtgaagctgctcctaatgtttcaagaactgtaatgtgcatttcttttttccatttattggtttcaaataagagttgtgcttgaaaatcaaccgttgaatgtccaaagcggtcgacattagcgtatggtgtgtagacaaaaatcgaacttgtcgattcttgttgaccattttcgcgatagtctgtatagacgatgtactgcttaaccttttcatcattaacctgattcatacttgatagaatcgtcaaattttcgtttgcctcaatttgcgctaactttcgtgcataggcttggtcgttttcgtttgccatttgattacccccccatttgtctttcaaaccgattataccatagctttctcatttaaaccgtgatttattacggttataaccatgttatttttacaatttgaaaacgttcactattcggcggtagtactgaactcgttgcccgcctaaataatccggtagttgtgattgataagtcttctcgaactgaactttctgtaaactcgcttgcgatgcttggttggttaaaaagcaggccgcattaaaggtgtttacaccagtttcttgcgcataggcttgcatcgttgccggcaatactgcgctgataatcccacatcgttgatatgccggtaagatggcaaaactgagttcatatgccgcgactgattgtccatccgcactaagggtaggggcgagcattatcaatccttgcaccacctgcgttgtgcgatcaacaatcgcccaagcatcctcatcattcatcaacattgttagaaacgactgtgcttcttgttgagattgaaaagccgtcatatttagctgcgtcacaatctttttttgacaaccaatttgatagaccacttcaagatccattagttgaaaatgccgtagttcagttgtggcagtcctaatctgcatctggaacaactcctttgtcatatcaacactcatagtaacccacttacagtgttgcgccaagtaaattcttatgtttccattaaacaaaagcgccaaagttgtggtataccactttttcagtttatactaataacgattaattactcttgtagaaagcgagcataccgatgacattccgcgattatttccatttattttcgaccgtttctcaacaagccgaatcctatgattattttttacactttattgagacacctgttcctgatttacaacggtatcccgaattaactaaaatttgtgactgggccgcttatgatgatcacagttttcgtctgtggacaagcttgcccctcgacgaattcgagcagcgttttgctgaaactgtcccattaccaagcgattcttaccagttagattacagttacaatttacaagatacaaattttttctaaagttcatgcttgacttttaattcgaactaccgtaaattgaataacaatcataagtcatcttaattcaaactaagtagtgcattatctgggtgtcagaaagtcggtggttgctgcgaaccgatcagggtaattgttacgaaatactgaatggatgattcggctaattaacaggaccgttatcacctgtaagagtggtgtgttaccttaaaatgacacgttaactgggtggtaccgcggtttccaatcgtccctattcgcatcagcgagtagggactttttttgtagagtgcgtgatttagcgcttaatatctaaacatttgcatagaacattgccaatcaaaaacacatttcaactatggagggattttcatgttcaagattgcatcgtgcgggggaatcctccgttatcagtcttttgtcgcaccagcctaaccattaaacttaaaaggatgcgatttaaatgacaaaacacaaaactagtttattagaagcaagtatcgttttacttattctgctagccatcatgggtagcggcgtgattgttttccaactttcaccacaaacacccgtcttaacggcgattgccctcttgattctatgggcccgttggcggcactttagctgggacgccattcattctggtatcgaagatggtctcaaaagcggaatcattcctatcattattttcattctcgtcggcgccttaatcagtatctggattgccgccggtgtgattcctagcctgatggtctggggcttcaaaatggtcagtgtccactggttcattccctcgattttcgtcgtctgtgcgcttgtcggcagtgccatcgggagcgcctttaccgtcatttcaaccgtcggcattgctttcttcgggattggagccacactcggactaaacactaccatcgtggccgcagctattatttccggggcaatattcggtgataagtcatcgccactttcacaatcaacaaacttaaccgcagcggttactgaaacagatctatttgaacatattaagaacttgatgtggaccacggttccagcgtttgttggctcattaattttatacgctatcattggccacacctcgaaaaatgtctccctcgataaaattggtgcgacggttgctgtcttaaacacgcacacttcagttagcctacttgcactaattccaatcatcttaattttcgtttgtgctcgccttaaaatgccagcaattccaacactctttttaaacattgccgtttcaatcggtttaatctttttccacaacccacacacaccaattgctaaaattgcgagttacattgaaaatgggtttgttgcccacaccggcgataaaagtatcgatgccttgctctcacgcggtgggattaatagcatgttaagcaccgtcgccttaattatcttgaccttaaccctcggtggcctcttaatgaagcttggtttaatcgaacgcgtgatggcccctcttgctacccatcttaagacgccaggtcaattgctcagcgccgttattgcttctgggattggcgttaacctctttatcggtgaagaattcctttctgtgattctccctggtaaagccttcaagagcacctttgaaaaatcaaacttgagtaatcttgctttagggcgcgcccttgaagatggtgggacagttatcaactacctcgttccatggggcgtcgctggcgtttttgccgctaatactttaggcgtccctaccttgagttaccttccattttgtttcttcagtctcttatcaccaatcttctcaattctcagtgccgttactggcatcgggttaaagagaaaaaccgcctaaacacgcaaaaaaggcccaggataaaatatcctgggcctttttttacattaattgcattaggaattgaccgccatacaccagcgcaaaactatacactgcaattgaagctggcttgcataaaataatgatccatgtaaatttcttcaatgacatctcggtgagcccagccatcaagcacaagacatcgtctggtgcgaccggtaagaaaatcgcaagtgcgaagaagcgcacaaagtttttcttttccataattgtcccgatatacttgtcatacgttttttcactgatgacgtgtaagatgaacggcttcccaaattgtcgtgctaataagaagttcaagatagaaccaattgcaatcccgacgtaattataaacaaacccccaaagtgggccgaataccaaaaccccggctgcggtgctaatcccgcctggaatgacaggaatcacaacttgaataatctgaatcgtgatgaaaatcagcggaccaattagcacagagtgccccaaatacgcctgcaacgcggtcgtgttattaaaaagaccaagccgagaccaataaatagccaatgagatgcttccgattaatgccatgagagacgttgcgctgattaagcgtcttgaaattgttctactcatccgctgaattccttccaaggttaattttaattataatttaccacattcaacattattttttatcggtcgctagtctgatttaaaaaagcttaactttctaagaacgtccgaaatggtttcaatccttgtgcatgatatttttcaacaaaggccgctacttctgctggatcctgtgtttgatcatcaatcacgagttgttcaacgggtaacggacgttcgttagcaattttaacatcaatcacaacaggttccttcgtgcctttagcagcagcaaaagcagctttcaatccagctaatgtccgtaccgtaaatccttttgcgcccatcgctgttgctgctgcaccgtaatctgccccttgaatggcaacccctgagtgtggttgacccttatcatcttgttcagcttcaatgaatccgaatgaatcgttgcttaatacaacgttgatgattggcatttggtatttaacttgcgtgataatatcttgcatcaccatcgtgaagccaccgtcaccactaatcgaccagatttgacggtcagggtaggcagcctgggtcccgattgctgcaggcactgcgcaacccattgtggcataccatgctgataacgtcatacgttggcctggatgcattttcaagaaacgcaccccatcgattgaaacattcccaacatcgagattaaagatggcatcgtcagtggccatctcattgatttgtttgaagacgggttccacacgtaacggtgtttgatcgtcttcttcaaaactggctttccattcattccagttttctttattggcgagtgctgctttataaaaggcagattttttggcaactggttcactcgcggctagcaatgcctttaatgccgtcttagcatccgctaaaattccgacatccacatggtgtctgtgtcctagtttagtaggatcgatatcaatttgaataaatttggcatctggcttgaagaagtattgaccgaattcataattgctaccgacaaataagattagatcagcagcttctgccaaatcaactccgggtttcgtggctactcgcccagctgaaaccatataagctggatggtcatcggcaacaatcccttttgaaagggctgatgacatcattgggatactcaaccgatcagataaagcaaccaattcttcacccgcagcacgtgcaccttgaccaaaataaataatgggttgttttgcatctttaattaactgtaatgtacgatcaatatccgcgcttcttggctctggataattgcccatttggaataagtttgcagtggcctcgaagttatctccaatcggttcccagcctaggttagttggaatcgtgacaactgctacgccgcggtgtttataggcttgttgaatggcttggtcgactacaagtggcatctgttcagccgtcattaccgtccgattatagactgccacatcagcaaacatggggttttcattcatttcttggaaataatccgtattcatcacacccgtagcaacttgtccaactaatgctaatacaggaacattatcatatttagcatcgtagagaccatttaacaagtggactgcaccaggtccggctgagccaaatgtagcagcaatcttgccagttgctttggcttcacccgccgctgctagtgcaccgacttcttcatggcgcacttgaatgtaacgcataatcgctttctggttatgtagtgcattcatcgttgaatcaaacgagccaccgggtaaaccaaaaatatggtcaattccccagtctgccatgacttttaacattgcatctgatgcgtttattttctgtgctaccattaataaagacctcctgatgattttatgtttcacttacttaagtataccgcttaaaatgtaagcgttacaaataatgtccaaaaaattttgagacagtggctaacttgattctaaaatgcgcggctgagaaaaacaacgattaaccgccataaaaacgggttacttattggtgccgtttgtgtcgtctgcgctatcgcaattcctcttgtacttgctgcctattacctattctaaaaaagaccaatcataatgaaaattcattatgattggtcttttaattttggaaattaacgtttcttagttgctttcttacgtgctttagcaagtgctttttcacgatcacgcttttctttttccttggcttcgcgttcgcggcgaatcttaaatggattttgaatcaccattgtttgacccactgaaaaggcgttcgttaccacccagtaaattgaaacagcagacgcgatgttcatggccatcacaaaaatcatgattggcatcacccacaacattgcggatgacgcagcattcttcgtgggttgcgacatcattgttagatacgatgttgcaaatgtaaagatcgcagccaagatagccataataaagtaaggatcagctttcccaagttgcatccataagaacgtcccactctttaaagcagctgttcgatagattgcttggtacaaggcaatcaacactggcatttgaaccactaatggtaaacagcccacaactggattgacgcccgcttcagcatatagcttttgcgtttcttcgcgtaacttctgttgtgtctcagcatctttagaagcatatttcttttgaagtgcttgaatttctggtgcaacttcttgttgtttgagcatgctcttactttgccaccaagttaatggcaagataatcacccgaatgatgatggtgaaggccacaattgcccaaccataactgccaccaaagatgtctgctaaccataaaataaagcgggagaagttataaataacataatgatcccagaagccagtactgctactatcaactggtgatgtactacaccccgctgcgattagcatgaacaagaatagactggccactaataatagccgtttgcgattttttgaactcactgtaatccctcacttattcagaagcagaatctgcttcttcctttaatagctttgctagttttaagacgtgcattaaattctgtttggtttccgccattgttagttggttagcgccgcgtcttgcgatcactaaaaagtcgacagtctgtggtaactctggcttcaactccaacaagctctggcgaatgtaacgtttaacctgattacgcatcactgcgttacccacttttttacctacggacaggcccacccgaaaatgcttttgaccaggtttttctaattgataaaccacaaaattgcggttggcaactgaatgacctgcttcaaaaaccgtttggaaatcctgttcttttttgacgcggtacgactttctcataattcactccggcatttcatttaattaattgaggataataaaaaaaccactgaagcatcagtggcctatgcagataatacttttctgcctttagcacggcgtcttgcaagtaccttgcgaccgttcttagtattcatacgtttcatgaaaccatgaacacgttctttatggcgtttctttggttggaaagttctctttgtagtcattatactggcacctcctaattgactgtgtctattgttttcatatctgagaaacaacgggtgataaataccacctacgacattcactaaaatataatagcatatttctatagaagttaaaacactttccataaaaaaacagaataaatattcttatccacaaaaaaaataattcattggctttcttgtggataactgattataccgaatcgtccgatttttgtcacgcacagattacttgctgatttatccagaaaatcacagggtgttactatgttatccacaagctattttcaagctgtgcacaaattgataaaaccttttaatagcaagcatcagatacacacacttttttgtggataagtgcgataatcgtttgttgttttctgttttccacagtccccactaaaagttatccccggtcgtgtgttcaagtggataactttttaattcattcctgtggattttgttcttgttgtggaaaacttttttttagaatgctagaatgtagatagtctttctttattgaactttttttcaataaagtggttattttacgtgaggaggacacgctacatgcctgatcttcaggaactttggaactatttgcgggaagaattccaaaatgatttaacacccgtcggttttaatgcttggattaaaaccgccaaaccgcttgcttttagagccaatgaaatactgatcgaagtgccttctcccttacacaaagagtattgggaaagtaacttggccactaaggtcgttgaaggggcctacgaattcgcagagattgaattgacccctatttttctgttacctaccgaagccgagcagcttcaagctgaaaaaccagctgaagaacgcagcctcaccaaagctgaaaccccaacctttttacgtgaaacgcatttaaatagtaaatacacgttcgacacgtttgtgactgggaaaggcaatcagatggcccacgctgcagcactcgttgtttcagaagaacccggtgttttatataatccactttttttatacggtggagttggtttaggtaaaacccatttgatgcaagctatcggtcaccagctgttactctctaaacctgacacgaacgtcaagtatgtgacgagtgaagcttttgccaacgacttcatcaattcgattcaaacgaagaatcaagaaaaattccgccaagaataccgaaacgttgatttattattggtcgatgatattcaattttttgcggataaagaagggactcaggaagagtttttccataccttcaatgatctctacaatgataaaaagcaaattgtcttaacatctgatcgtttacctaatgaaattcccaagctccaagaacgcttagtttcacggtttaaatggggcttgtccgtcgacattacgccgcctgatctggaaactcgaattgctattttacggaacaaagccgacacagaacgcctcgaaatcccagaagatactttgagctacatcgctggtcaaattgattccaacgtccgtgaacttgaaggttcactggttcgggttcaagcttatgcaaccatgcaaaatgctgaaattacaactagtcttgccgccgatgcccttaaaggcttgaaactcaatgggaagtcgagtcaactttcaattgctaagattcaatccgtagtcgctaagtactacagcctttcaatcactgatttaaaagggcgcaagcgcgttaaagaaattgtgctcccacggcaaatcgctatgtacttggcccgcgaaatgaccgacagttctcttcccaaaattggacaagaatttggcggtaaagatcatacaacagttatgcacgctcatgaacgaattagccaagctttaacgagtgatcaaaatctaaaagatgccatcttagatttgaagaataccttaaaaggctaaatataggctgtggataaacgctaaagttatcctaagagttgttctcaacttatccacaagtggaaaactagacactcttttgcttttctatgttatccacaggttccacaggccctactactattacttaaaattcttttataatatatatatctattttccttcggaggtttaacatccatgaaattctcaattaaccgcaacgtgttcatcaaaacccttaatgatgttcaacgtgccatttcagctaaaacaacgattcctattttgacggggcttaaattagtgctttcgcaagaaggcttaaccttaaccggtagtgatgctgatatttcaattgaagcaacccttgctagtaatgatgaaaagaatcaattagtcgttgaagaagcaggtgccattgttttaccagcccgcttctttagtgaaatcgttaaaaaattacctgaagatcaaatgacgattgctgttggtgacaacttccaaacaaccattcgttcaggtaaatcagaatttacaattaatggcttagatgctaatagttatccacatctacctgaaattgcgggacaaaatccgttcagtatcagtactgatgtgcttaaacaattaattcatcaaaccgtcatcgctgtttctaaccaagaaagtcgcccaatcttaacgggggttcatttggttttaaaagatggcgaaatgttagccgtcgcaacggacagtcatcgacttgcacaacgaaaattaaccgtttcagtaccaagtgatgggaactacgatgtcattattcctgggaagagtttaattgaactttcaagaacgttagcagacgaagttgaaaccgttgaaattcggattgctgaaaaccaagtgctctttaaagccggtaacttagccttttattctcggttgttagaaggaaattaccctgacacagcacgtttaattccaacttcttcaagtacacaaatcgaattcgatgcaccggtcttattagctgcgattgaacgggcatcattgttgtctcatgaaagtcggaacaatgttgtccggttgacattgaatacaacggacaacacggcaatcatctacgggaactcaccggacgttgggaatgttgaagaagcccttcaatttgaaaacctaacgggcgaagatctcgaaatttcatttaacccagattatatgaaggatgctttacgttcatttggtcaaacaaccatcgtgattaactttacggcagctttacggccatttacattggtcccaagtgaagatcaagaacactacattcaattaatcacaccagttcggacattttaataatcaaaaaacgccgcatttaaaaatggggcgtttttttttgcgctaaaattaaaataaattcgtttacagcgatttcggataaaacaagtaggataaggttaaagcacttaaaaacgctcagaaagcattttagctgtgtttatttgtttttaaggcaaaaaaagtctataattgtaaggtataacagatcggtattagcgcagtaattaatatcgttaagaatggtgggttgagtatggcacaagaaattaaacttgaagctgagtttgtgacactcgggcaactccttaaagaggccggtgtgattgaaacaggtgggcaagcaaaatggtttttaaaagaaacaacggttttagtgaacggagaacctgatgatcgtcgcggccggaagttatatccggaagacgtcgttgaggtgcccgataacggccagtttgtcattaaacaacaagaaagattgtaggcgactatgtatttaagtgaactccaacttgatcattatcggaattacgagcaagtggacgtccatttctcgccagatatcaatgtcttgattggtgaaaatgcgcagggcaaaacgaacttgctagaagccatctatgtgttggctttggctcgttcgcatcggacgaataatgatcgtgaactgatacaatgggatggcgaattcgcaaagattaccggcttggtacaacggcaaactggccacacaccattagaattggtggtcagtcaaaaaggtaaaaaagcgaaggtcaatcatttagaacaggctaagttatcccaatatatcggtcaattgaatgtcgtcttgtttgcaccggaggatttgaatatcgtgaaaggctcgccagctgtccgacgacgctttatcgatatggaattcggtcaaatgagtgcgaagtacctgtataacatttcgcaatacaagtcgattttgaaacagcggaatcagtatttgaagcaactacaacgacgtcaagctaaagatttagtgtatttaggcgtattgtccgaccagttagccgcttatggcgcggaagtcacggttgctcgccgtgaatttctgcaacagatggagaagtgggcgcagaagttgcatcaagagattaccaaagagcgggaagttttgacgtttaaataccaaagtcagattccagatgagcagttggtacttgatgccgaaggtttataccaacagtttcaaatcctatacgagtcgcaccaaacacgggaagtcgaacagggcacgacattggttggcccgcaccgcgacgacgtgttatttttggttaacggtaaggacgtgcaatcgtttggctctcaaggccaacagcgcacaaccgcgttaagtgttaaattggcggaaattgacctaatgaaggaacaaaccggtgaatatcccgtcctattactggacgatgtgttgtccgagcttgacgatttacgccaaacacacttattgaaaacgttccagaataaggtgcagacgttcttaacgacaactagtcttgaaaatgtcaaaaaagaaattattagtgcgccacgggtgtttaccgtgacaaacggcaccgtgacagtggccgatgcagcagcaaattagtcaaaaaacgatcaaacggaggtttttttcttggcagatgatcaaatgaatcaagagacagaagcacaaatggaagcaaaagaagaacgcgctaaatcttatgatgccagtcaaattcaggtgttagaaggcctagaagccgttcgtaaacgaccagggatgtacattgggacaacgagttcccaagggttgcatcatttggtttgggaaattattgataatgggattgatgaagcactcgctggttttgcaacagaaatcaacgtggttgttgaacccgataatagtattacagttacagatgatgggcgtgggattccagttgggattcaagctaagactggtaagtctgcgctcgaaaccgtctttacaatcctgcatgccggtgggaaattcggcggcggcggatacaaagtatctggtgggttgcatggtgttggggcttcggtcgttaatgccttgtcaacggaattagatgcggttgttactcaaggcggtaaacgctactacatcgatttcaagcgggggaaagtgcaaacgccaatgaagatgattggtgacgcaccagcccatgaacatggtacgaaagttcattttgtccctgatgctgatatctttactgaaacaacggtgtatgatgataaaattttaacaacgcggattcgggaattggccttcttaaacaaaggcttgaagttaacgttcaccgacaaacgggctgaaacacatgaaaaacttgaatttcactatgaaggtgggattaagagttacgttgaatatttagacgacaaaaaagagacccttttagacgaaccaatctatgttgaaggtgaacaaaacgggattaccgtggaagttgctttgcaatatacgaatgattatcggacgaacttgatgacctttgccaataacattcatacctacgaaggtgggactcatgaatctggctttaagacggcgctcacgcgggttattaatgactacgcaaccaagcaaaacatcttaaaagccaacgacacgaacctttctggggaagatgtgcgtgaaggcttaacagcggttgtctcggttaaacatccggatcctcaatttgaaggtcaaacgaagacgaaattaggcaatgccgacgcacggacggtgactgatcggatgttctctgatcatttcacgaagttcttgatggaaaacccatcgattgcccgccaaattgtcgacaaaggctcattggctgccaaagcccggttagctgctaaacgcgctcgtgaagtgacacggaagaagaacggtcttgaaatctcaaacttgccaggtaagttggccgataatagtagtaaagatcctgctatttcagaattattcatcgtcgaaggggattccgctgggggttcagcaaaatcaggccgttcacgtttaacgcaagccatcttgccaattcgggggaaaatcctgaatgttgaaaaagctagcatggaaaaaatcttggcgaatgatgaaatccggaccttatttacagcaatgggcactggttttggccaagaattcgatgtggctaaagcccgttatcataagttgatcatcatgaccgatgccgatgtcgatggtgcgcatattcggacgttgcttttaacgttgttctaccgttacatgcgaccaatcgtcgaagcgggttacgtgtatatcgcacaaccacctttgtaccgtgttaaacaagggaagatgatgcgctatattgattctgatgaagaattacaagaagtgttagggacgctccaaccaagtcctaaacctgaagtgcaacgttacaaagggttaggggaaatggatgctagccaattatgggaaacaaccatggatcctgaaaaccggcgcatgttgcgggttaacgttgaagatgccgaagaagcggatcaaatttttgaaatgttaatgggcgatcgggttgaacctcgtcggattttcattgaagaaaatgccgtttacatggatccaaagagcatcgatgcatagcgtgttcgccgcttaaacggacacattgaaagactgactgagaggggtttatagattaatggcaaacgaaattggccaagacggtcggattgaaaacgtcaatttatctaagacaatgcgtaaatcattcctggaatatgcaatgagtgtcattgttgcgcgtgccttaccagacgttcgtgatgggttaaaacctgttcaacgccgaattttatacggaatgaatgaattaggggtcactcccgaaaagccttacaagaaatctgccagaattgttggggatgttatggggaagtaccatccacatggtgattcagcgatttatgaagcaatggtgcggatggcacaagattttagttatcgttacatgttagtggatggtcatgggaatttcggctctgtcgatggtgatggtgctgccgcaatgcggtacaccgaagctcggatgagcaagatggctgtcgaaatgttacgtgatatcaataagaatacaattgattatgtaccgaattatgatgagtcagaacgcgaacccgctgttttaccagcccgtttcccgaacctactcgtcaacggggcgactgggattgccgttgggatgacaaccaatattccaccgcacaatttagccgaagtgattagcgcattacacatcttgatggataatccagatgcgacaaccgctgatttgatggatgccttacctggccctgattttccaactggtgggttagtgatgggtaaatctggtattcgccatgcgtatgaatctggtaaagggacaatcacccttcgcgctaaagtggacgttgaggtccaaaagaacggcaaagaacggattattgtcactgaaattccatacatggttaataaggccaagttggtcgaacggattgctgaattagcccgtgacaaacggcttgaagggattaccgatttaaacgatgaatctgatcgtgatgggatgcgcatcgtaatcgatgtgcgtcgggatatgagtgcttcagttgtcttgaataacctgtacaaattgacaccattacaaacctcattctcatttaatatggtggccatcgtgaatggtgcccctaaagtcttgagtttgaaatcaatcttggaacactacttagtgcaccaagaagaagtcattcgtcggcggactgaatttgatttgaagaaggccgaagcgcgggcgcacattttagctgggttacgcattgctttagaccatatcgatgcgattattcagatcattcgtggttcgaatacaggtgatgccgctaaggtcttgttgatggatcgttatgatttatcggataaacaagcgcaagccatcttggatatgcgtttagttcgattaaccggtttggaacgtgataaagtcgaaaatgaatacaataatttgatgactttaattgctgatttgaaagatattttagccaaaccagaacgcattaagaagattatctacgatgaattgcttgaactccaaagtaaattcggtgacaaacgccggacagaattattggtgggtgaagtgcttagtcttgaagacgaagacttaatcgaagaagaagacgttgtgattgcattaacgcataacggctacattaaacgattaccagccagcgaattcaaagttcaaaatcgtggtggtcgtgggattcaaggaatgggcgtccatgatgacgacttcatcgaacacttgctttcgacttcgactcatgaagtgctcttattcttcaccaatactgggaaagtttaccgtgccaaagggtatgaaattccagaatatgggcggactgctaagggaattccaatcattaacttattaggcattaattctgatgaacgcgttcagaccatggttaatgttggtaaagaagtgcaagacgaacaatcactcttctttattacccgcttagggacggtcaaacggacatccgtttctgaattcgccaatatccgtagcaatgggttgaaagcattgaccttgcgggaagaggatgaattaagtaacgtcttgatgactgatgggcaacaaaatatctttatcgggacccataatggttatgctgtgtcatttagtgagacagctgtccgttcgatggggagaaccgctgctggtgtgcgtgggattcggttacgtgaaggcgactatgtggttggctctgacttactgattccgggtcaagaaatccttgttatctctgaaaaagggtacggcaaacggacaccggttgcagattacccaatcaagggtcgtggtggtaaagggattaagactgccaacatcactgaaaagaacggcccattagctgggattgctgccgtcactggagaagaggatattctcttaatcactgatactggcgtcttgattcgtttcaaggtcgctaacgtttcacaaactggccgggccacacttggtgtgcgtttaatccgggtggatgacgaagcgaaggtcgcaacaatggcgaaagtcgaagctgaaccagatgaacctgaaacaccagaagcaacgacggcaccaatagcaccaactgatgacactactgatactggcttagcacaagtcgatgaattactcgcgcgggctgaagccgatcaatcggcatcagatgatcaagattcagaaaattaattaaattaaaaaaataaaaatcgtttctgcgtaaatacacttgtaacaactgttaccaagcgtgttagcagcaacgatttttattttagattgtattttaacggccgttatgatagaattttatcttgtgagtatctgtgatttagacacagggtctaaatcgtgaggctaatttttattagtcagttactccttgttcttacacaggtaagaacctaaagtccataaggaggtgaacagtcatggctcaatcaaaatacgaagttacttacatcatctcaacaacacttgatgaagaaagtaaaacagctcttgtcaaccgttacgacggcatcttaaaagacaacggcgctgaagtgattgattcaaaagactggtcaaaacgtcgtttagcttatgaaatcaacaatcaacacgaaggcatttaccatatcgtaaatgttttagctgataatgatgaagctttaaacgaatttgatcgtctagctaagattgatggctcagtattacgccatatgatcgttaaacgcgaagactaattttgaattgtaattattgaatagaggggagctgacagaatgattaatcgagttgtactcgttggtcggctaacacgcgatgttgacttacgttacacttctagtggtgctgctgttgggactttctcaatcgcagtgaaccgtcaattcacgaatgccaatggtgatcgtgaagcagactttatcaactgtgtcatctggcgtaaatcagcggaaaatttcgctaatttcactaagaaaggctcactagtcggagttgatggccgtctacaaacgagaaattatgaaaaccaacaaggtcaacgtgtatacgtaaccgaagtggtcgttgataacttctcattgttagaatcacggacaacaacggagcaacggcaaggggatggcgcaagccaaaactttaacaacaatcaaagcaatggtagccaacaatctggatttaccagccctcaacaatcgggtaatccatcagctgcaaataacactcaagccgatccatttgcaaataatggtcaagcaattgatatttcagatgatgatttacctttctaaaataaactgttttggaaggaggaactttcaatggctcaacaaagaagaggcggcaaccgtcgtcgtcgtaaggttgatttcatcgctgctaaccacatcgaatatatcgactacaaagacactgatttattgaaacgttttatctcagaacgcggtaagattttacctcgtcgggtatctggtacaagtgctaaaaaccaacgtcgtttgacaattgcaatcaaacgcgcacggattatgggcttattaccattcgttacagaagactaatcagtcaaccaaaagacctgctaaacactgtttagcaggtctttttttgtgcgctttaataggggaacatgggattaaattacgggttcaaagcggtaattgtagggcaattgtgctaaaataaaagtagcattttttaagttttagtaaagaaccacatagactcaatgatagatgaacaagaatcagaatgggatctagaattaaggagtttacatgaaaaataagtttaaacaattaaaattaccacagtttttagatgatactcgcctgcggaccgttgccctgattttgttgggccttacagcggttagtttggtatttgctgcgatgttagattggctaattgctctaattttattcgtgctgctaatcgggacggtcattactgtgctatacgcgatcgaaacggtcactgagaatacagccaagtatgtctcggacttgtcgtaccgcattaagcgcggcgagcaagaggctttaattaagatgccaattgggattttattgtacaacgaatcaggtgagattcaatggacgaatccttatttacagcaatatttcggtaataaagaagttttaggcaaaaagattaagtctgtcgatccagagttggcagaattagtcgcacaaaatgaagatgctaatgaaacaaaaattgttcgttggggcgataatcaattccaaatcattatccaagaaagcattggggtggtttatcttctcgatattacacgctatgcggccattgaagatcgttatgaagatgagcaagtagccatcgggcaagtgttcttagataattatgatgaaatcactcagacaatggatgatcaatctgtttctaatctgaataactatgtcaccaacgagttatcacgctgggcgaatcagtttcagatgttcttgaagcgagttgatgatgatcatttctttgttttggcgtacgccaaatcattacacgccgctgaacaagagaagtttaagattttagatgaaattcgagaagaaacatccaaacaaaacttcccactaacgttgagtgttgggtttgcttatggggaatccgatttagccgttctagcaacaacttcacagagcaatttggatcttgccctcggtcgtggtggtgaccaagtcgttgtcaaagcgagtgaaggacaagcacgtttttatggtggtaagactaatccgatggaaaaacggacgcgggttcgtgcacggatgatttcacaagccttacaagaaatcttcaaacaagttgacgaagtctttgttatgggccatattcggccagatatggatgcattgggcgcctcatttgggattcgccggattgccgagatgaacggtaagaagtgctacgtggtcgttgaccaaaacaatattcatacagatattcaacgtcttttagaggaagttaaagcctaccctgaaattgcagtggaagtgttgtcgcctgaagaagcgctcgaaaaagcaacggccaatagtttattagtgatggtcgatcattctaaaccatccataacaatggcgcctaagttgtacgagaagcttgctcagcggacgattgtcatcgatcaccatcgtcgtggggaagagttcccagaaaacccaatgttggtttatatcgagccctacgcctcttcaacgtgtgagttagtgacggaaatgtttgaatatcaaccacaaaatgtcgctaatattaacaagttcgaagccacaacgatgttggctgggattacggttgatacgcagtcattttcaatgcgaactgggacgcgaacgtttgacgcagctagttatttacgttcagttggggctgatgcttcgatggttcaacacttgttaaaagaaaatgtcgataattatattcaaaagaatcatttaattgaaaccattgaaatggttgagccaaatatggcattatgtatgggtgaggacaaccgtacctacgatccggtcatcgcagcacaagcagcggataccttgctgtcattgtcagacattgaagcctcgtttgtcattgtgaaacgcccagatggcatgattgccatttcagcgcggagtctaggtgatgtgaatgtgcaagtgattatggagaaattaggtggcggtggtcatctttccaatgcggcaacgcagatggcagatacgactgtttccgaagccaaggcgaagttattaacggttttggcagagctatttgatccggaaacggacaaggaagcaacaaacgattaattagataaggtggtcagaacaatgaaagttattttcttagaagatgtacgcggtaaaggtaaaaaaggccaagtgaaagatgtgccagatggttacgcacaaaactttttaattaaaaatgggaaagcaaaacccgcaacatcagctgctatcagtgctttaaaaggccaacaacatgctgaagctaaaaatgcagctgctgaattagcggaagcaaaggttttaaaagccaaaattgaagacgataaaacaatcgttgaaatcaaatctaaagcgggcgaagacagtcgcttatttggttcaattccaagtaagcaaattgcccaagcattggctcaacaatatcagatcaatgttgataaacggaaaattgatttaccagaaccaatcaaagcgttgggttaccggaatgttgatgtacggattcaccctgatgtaacagctacgattcgtgtgcatatcgtaaccgaataataaaatgaatgattgaaaagaccgtgattagcaccactatcacggctttttttattgctgaccaatcggtgactgttgccagtcactggtattttgagtaaactagtgagtaattgaagtcgattaaccaaaggagtaaaaatggtgaataatgaactaattgaacaagtaccgccgcagaataatgaggcggaacaggccgttttaggggccgtctttattagtggcgatgcgctcgttgaagcaatggaatacgttactgccgacgatttttatcgtaaagcccaccgtttgatcttcgagacgatggttgaattaaacgaacggggtgaaggaatcgatgcggtgactttaaagagtgccctcgatgcgcagaaccaattggaagatatcggtggtattggttatttagctgagttggctgaggctgtaccaacggcagccaacgtagtttattatgccaagattgtctctgaaaaagcaatgctgcgccgtttaatccaaaccgctcaaaatattgtggcaaagggttacgcgcaagatgaagacgtcacggatattttagataccgctgaaaaggaaatcatggatgtttccgaacggcaaaataaggccgggttcaaatcaatttcagatgtcttaacgagttcaattgaacaaattgataagttatatcaaaatgaagaagacattacgggtctatcaacgggataccgcgatttagataagattactgcgggtttgcatgaagatgaactcattattttagcggcccggcccggggtggggaaaaccgcgtttgtcttaaacattgctcagaatatcgggacgaaaaccaatgagaatattgcaatttttagtttggaaatgggtgctgaacaactcgttaaccggatgttgtgtgcagaaggaagtattgacgccaaccatctaagaaccgggcaactcgacgaacttgaatggcagaatctaatcgtagccatggggagcctttcaaaagcgaatatctatattgatgatacgcccggcgtgaaaatggcggaaattcgggcgaaatgtcggcgcttagcgaaggaaaaagggggcgttggcttaatcgtcattgattacttgcaactaattgaaggttccggccaagaaaaccggcaacaagaagtctcggcgatttcacgtcaattaaagaaattggctaaagaattacgggtaccggtcattgcgctctctcaactctctcgtggggttgaacaacgacaagataaacgcccagtcctttcagatattcgtgaatcaggatcaatcgaacaagatgctgatatcgttgctttcttatatcgtgatgattactatcgcgatgaacctggggaagatggcgatgatttcggtggtggcaatccgccagcaccagcgccacagcagtcagatgatgcggacgttggagaagttgaagtgattatcgaaaaaaaccgtgcgggtgcacgagggacagtcaaattattatttgtcaaaacgtttaataagttctcatcaatttcgtatgcggaccaatagtaatgactatttttaataaatagtgaatattatcgtaaatgaaatacttaaaaaagccatcataattaaagtaaaaactttaattatgatgatttttttgatgggcatattaactgatattcgttaattagatgacaataatgggagggagaaatagaatgataacatcgttactttagttttatgagaatattctaaagatatttaaaaatttatttatatccaaaaatagttaatataatgcgaatctatagtgaatttcaattaatattaacattgttttccgtggctatggatggcattgttgtgttaagcactgaatgggcaactttttaccaaacacttacgcaaacatcgattacgattattgctaatgcggttgaactacctaagcaatacaaataccatagtcagtctaaacaaattatcacactggggcgcttaggcgaacgtaagggcacctacgatattctaaaattagcaggggtgattcaatcccgttttccggatattcaatttacgttgtatggtgatggtgaacaggggaaggtccagcaagaaatagaccgcctaaagttaaccaatgtgcgccttggtggctggttagctttggcggatcgcaataccgttattcaagaaagcctgttacacctattgccctcatatcaagaaggcttaccaagggcaattttagaaacgatggcttatggaattcccaatttagctacgaatgtcggggacattccacaagtaattgagaatcatgtgagcggggatttggtgacaccaggagatgacgctggcttagttcaacaactcagtgattttctaggtagtcagatgcgacgtgaaacatattcacgaaatgcccggcaaacgattaacgactgtttctcattgcaacagtattttagccggtggcaccagttttatcaaaggattatgaatgaaacggaggaggaatgatgaattctatagcgcaatcgactgataaattagagttgattaatttctatcatgagatggctcaaatttcagcaaacattagtcaaattttaaatgaagacggagttaccatcgaacaaattcgtattttacaaacattaaaacgctataaaggtattaataatagtaagattgcacaagtattaaaaacatctaccgcagcatcttcaaataaattacgtaaattagaggatcaggggtatatcagcaaacaatatggcaaacaggatgatcggcgaattgttgatatagcagtttctcccgttggagaatcaatttatcgtcgatttgagcaggcgtgtgaaacttacattaaaagtattactgaatcagataagaaaattagcatgccagaattaatgcagctgtttgaaatgacaaatagacttgctagaagtattcggacaactgaaattgaatagacaaaaaaagtgcccacaaacggttaaatttgtaggcactttttttgatttatttttgttcagcatgttttgctgcaattaatgaacgatagttgaatagtaagtttaagataacagcgctgagactgccgactactaagccgttgcctagaattgtgcgaacactcgttggtagtgattggagcaaggttggatgaattgctacccctaagcctaagccgattgaaacggcagcgactagtaagttgcggttatcatcaagatcgactttgtgtaacatcttaatgccttgaatcccaacagtgccgaacataacgaccatcgcgccccctaaaacagcgcttggaataatggttgcaacggccccaatcttaggtaataatcctaagatgattaagaagaatgctgagtagtaaactggttttttcgttttgataccggataattgaacaatcccaacattttgtgagaacgttgagtaagggaaggtgttgaacaatccccctaagatagcggcaatcccttcagcgcggaagccccgcttaagatcattgctagtaatgtcgcgcccaacgatttcaccaagggcgaagaagacaccgattgattcaatcatggtcgttaacgcagccaatgacattgaaacgattgatgaccattcaaaacgaggtgttccgaagtagaataattcaggtaatttgaaccaacttgcttgacctactggatctaaggacacaatcccaatcgcagctgcgattaaggtcccagcaataatcccaattaaaatggcgatttgttggatgaagccacgcccccagatactaaaaatcaggattagggcaatcgtttaaaaaccggtaattaagtttggtgtactcccaaacgacttagcagcaacatcgccaccgcctaagttttggaaagcaacgggaatcaatgtgaatccgattaatgtaatgagagaccctgtgacaactggtgggaagagccaacgtaaacgtgcaaacaagccagaaactaacaagatgaaaattccggcgccaataatactaccgtacataacgtcaattccgagttggctgttagtgccgatggcggctaacgggccaacgtactcaacagcacaacctaggacaaccggtaatgcaatcccggtcagtggggttcgttttaattgtaatagggtcgcaaccccgcacatgaaaatatcgactgaaacgaggtaagtcatttgagcggcattaaaatgtaatgcagccccgacaagtaatggaattaaaacatcgccagaatacattgctagaagatgttgtaagccgagaatcgctgctttaatgtggggaagcttttcatttggattaattggctgtgctgaatttgagtgtatatctgccacgagtgtccctccaagataatcgttaaaatttagttaacatttagtttagcacacgccaatagtgacttcaattagaaattaagtaaaaaacgaatataacattcttaaataatcgcgatagttcgcctttgtgatgatgcacaccaactgttcgatgacaaaagtgctttcttactgaatgattcgcttgaaaaaggcgataattgttcttaaattaccgagtattatgtttcacatgaaacgataatctgaaaactgggaagaatcttgtttttttagggtaagtacgttaaactaaaaggtatatgtgaaacaataatgttccacgaattaaacgcctactttaaagcatagttaaggagaaataatgacaccagcgggttttgcagcaacgttaaaaacatacaatattcaagtttcacaagcacaaatggatcagtttgaattgtatttcaatcggcttgtacaagtgaaccaacaagttaatttgacagccattacagaacaagaagcagtttatctcaagcacttcttcgattctgtcacaccaactttgtatcttgaaaaactacgcactgaaccccttacgatctgcgatattggtgcgggcgcgggttttccatcgttaccaatcaaaattttattcccgcaattgaagattacaattgttgattcattaaacaagcggattcacttcttagaagaattggtccgtgaattaggcttgtctgatgtgacgttggtccatgatcgagcagaactgttcagcaacccgaagagtccatatcgtgaacagtttgatattgtgactgcccgggccgttgcttcattaaatgtactggtagaattctgtttaccaactgttaaagttggtgggcagtttatcgcattaaaagcgagtcaaggtgaaacggaattggcagaagccaactatgcaatcgaaacacttggtggccaatttgcacaagacattgctttgacgctaccagaaacagatgatcaacgacatctaatcgtaattgataaggttgtaccgacacctgccaagtatccacggcgggctggtgtgccagttaaaaaaccgttaatggctaaggaggaaaaataatggcactctcattttttaataagaaaaaagacgataaaagtattaatcaagtgatcaaagtaccggtttcagcaattgtgcctaaccggttccaaccacgaaaagtatttaatgcggacaatatcgccgaattagcaagcacaatcgaacaacacggcttattgcaaccgattatcttacgtgaatatgaagatcaaaaatatgaaattattgcgggtgaacgccgttttagagcgattcaaaccctcaaatgggctgaattaccagcgattgttcaaactatggatgatcacgaaacagcttcaatggccttgattgaaaacttacaacgcgaagaattaaccgccgttgaagaagcacaagcttataaggacttaatgaagctgaacgacttcacacaagctagcttggcagaaaagatgggtaagagccaatcttttgttgctaataagttgcggctattgaaactctcacaacccgttcaagaagccatcatgaatcatgaaatttctgaacgacacggtcggagccttttacggttggatgaattcaagcaacaaatgattttacaccaaatcttggctgaacaattaacggttaaggatacggaagcgctggttaacaagacgttgaatcctgaaccagaatcaactgaagagacagttgatgcaaccgatgacagtttaaaagaagctaccacgaaggctaaaaaagcgaacgataaagcaaaaaaagcaattgcccatgatacacgcattgccgtcaacaccatcaaaaagtcggttcaaatggttgaacaaagcgggattgccgtcaaagccaccgaagaagaacaagatgatgtttatcggattacgatcgaaattccaaagcaataagggaggctcattatggcacacgttatttcaattgcaaatcaaaaaggtggcgttggtaaaacaacgaccacgattaatctaggcgcttgtttggcggatgctggcaatcacgtgttaatcattgattcagatgcacaagggaatgcgacaagcgggattggggttcaaaaatcccaagtcgaaaaagatatctatgatgtgttggtcgatgaattcccactaaaagaaacaattattaaaacatcacataagaacttagacattgttccagctacgattcaacttgcaggggcagagatcgagctaacatcacagatggcgcgtgaaatgcgcttgaagttagggttagaaccagtcttagccgattatgattacgttttgattgactgtccaccttcattagggcaactttcaatcaatgcctttacggcaagtaattcaatcatgattccagttcaaagtgaatattatgccttagaaggattgagccaattgttaaacaccgttcgtttggtgcaaaaacattttaacccaaacttagcgattgaaggcgtgttgttgacgatgtatgatgcgcggacgaatttaggggctcaagtgattgaagaagtgcgtaagtattttggtgatcgggtttacgacacgattgtgccacggaatacgcgcttagcagaagcacctagtcatggcgtatcaatcattgattatgatccaaaatcacggggcgctgaagtttaccaaaatttggcaaaggaagtgttagcagctcatggcaactagaaatggaaaaggattgggccgcggtttggatgctgtattttcagcgttcgaaggccctaataaaaaccgggcggatgaattagttgaagagattgcacttgatgatattcgtccaaatccctatcaaccgcggaagacatttgatgaagcggctttggctgaattagcagcgtcaattaagaagtcgggcgttttccaaccaatcattgttcgcaaaagtattaatggttacgaattaattgcgggtgaacgccgattccgtgcgtctaagttagctggtaaaacagcgataccagccatcacgcggcagtttgatgaatccgcaatgatggaaattgcggtcttggaaaacctgcaacgtgaagatttaacgccgttagaagaagcccaagcttacgatacactcttgaaaaagttaaacctgactcaagctgaagtatcagaacggttgggcaagagccgcccatacattgccaattacttgcgcttattgggtttacccaatgacgtgaagacgttattacaaaatggtgacctttcaatgggacaggcgcggacgttattatcattgaagaaaaaaagtcagattagtgcattagcgaaacgcacgattgatgaaggcttaacggtgcgacaactagagcagttaattaaccagatgaaccagattaaagctgcgaaagtgacgaagaccaagattaaatcaccctatattcaagcgagtgaaaatcaattggtcgataaatttgacaccaaggtcaatattgcgattaacagcaagggtcgcggaaagattgagattgattacagcacagtcgatgatttaaaccggattcttgcattgctagatgtgaatatcgattaaagtgaggagtcgagctagatgtatacattaggcgatcttgttcagatgaaaaaacaacatgcctgtggcaccaatcgctttgaagtggtgcgcttggggatggatattcgaattaagtgcatggggtgcggccacgccgtcttattaccgcgccgtgaattcgaaaagaaacttaagaagaatttggtgcctgcagcagaagtcgttgttgcggatgaaccccactatcaagagatgcaacaaggtcccaaccaaactaatttttaaagtaaaggaaagtgtaaaaaactatgtcattaaccgcaggaattgtaggattacccaacgtcggaaaatcaacgttatttaacgccatcacgaaagcaggcgccgaaatggcgaactacccatttgccacaatcgaccctaacgtcggcatggttgaagtccctgacaagcgtttagaccggattcaagaaattatcccggctaaaaagatcgtgccaacgacttttgaatttacggatattgctgggatcgttaaaggggctagcaaaggtgaagggcttgggaacaagttcttggaaaatattcgtcaagtcgatgcgattgtgcatgttgtgcgcgcctttgacgacgataatattacctctgttaccggaactgttgacccgttagacgacatcgatacaattaaccttgaattgagcttagctgatttagaaagtgttacgaagcgttatgcgcgtgttgaaaagattgcgcggacgaaagacaaagacgccttagccgaattcgaagtgcttaaaaagattaagcctgttcttgaagaaggcggctcagtacgttcaatcgaatttaatgaagatgaagcgaagttagttaaaggcttcttcttattaacatcaaaaccggttttatatgttgcaaatattgctgaagatgccatggctgatcctgatagtgtggattatgttaaacaaattcaagcgtccgcagctaaagaaggcgccgaagtaattgccatctcagcaagaactgaagaagaaatcgcctcattagatgatgccgataaggctgaatttttggaagccgaaggggtgactgaatcagggttggataaattgattcgtgcttcatatcatctactaggcttagcaacattctttaccgctggtggaaaagaaacccgggcatggactttccgtcaaggcatgaaggccccacaaaccgccggtgtcattcattccgactttgaacgcggatttatccgggcagaaacagtttcttttgctgatttagatcaatacggttcaatgcaagctgttaaagaagctggccgtttacgtttagaaggtaaagaatacatggtcgaagatggcgacatcatcgaatttagatttaacgtttaatgataattgaggaggaagacaattggctaagaacgaacaaccagcagtaaccccagaaccagttgatattgaagggttagaagcaaaactcagtaagaaaaatgcggactatttatttaagttcaaacgcgcattaaatgccgaacaagtgccagcagaacgccaaactgaaatcttggcagaaatgttaccagaaatggtagcagaacaacataagggcaagcctgcaacacaagtatatggtccagtgacaaccaagattgatcaattgttgcacgcgccaaaacgtcctaagcaaacatcacttcaactccaaatgcttgataacggcttaatctttttaattatgtacctagcctttaacggaattgcggcttatttctcaacgaaggggtcagcaactagcattgggattacatcaattgtcattacggctgcgcttgcagggatcatcatgacttatccaatgcgctatacgcaaatgccaaaagaacaacggccaccattttggaagatggcattggttgtaatcggcttaacactagcctttgttgcggcatacggtgtgacaatcttgattccaagtttcttgaatccagtcttgccaccacttgttcaaatcgtaattgcagcactcttaatcggcgtgcggatttatatcaaacgccgttttaagattacaggttcattcttcggttaatattacccgggaaataaatggtaattgaggaggatttgagatgattagcactgaagaacggcaaattggggcagtcagtacgttgattgtggccccaagtggtcaagaaaaagcggtattaccaactgtctttgtatatcatggttggacgcaccgtaaagagtcagaattaatggtcgcccactttttagccaaggctggttttcgcgtggtcttaccagatgcgaagtatcatggtaaacgacatggtagtcagctcttttctgagttaatgtttgaattttgggatattgtgatgcagtcggtcaccgagtttggtgaactggttgcaacactgagtgctgaaggcttagttgatcctgaacggattggtgttacagggacttcgatgggtggcattacaaccgatgcgattctcacccgatatccgaatgtcaaaattggcgttgataagattggcgcaccaatgcctgtcgcacttgctaaatggcaggttagtcaattaccaacggccttacaaaccaagtatcaagatgcgattgaagataccttagcacggttagcggcgtatgacttatcaatgcacgttgatcacttggcaggtcgtccattgcatttctatcatggaactgctgatacgatggtgccatatcaattcacggcagattttatgaccgaaattcaggcgcaaccaagttcagccaccgcattagtgacattgacgacggaagaaaatgggcaacataaagtatcagacgatgcccagctcaaaaccgttgaactgatgcaacagtacctactttaaaaatgagaaaagccgccagaacgtaaattgttctcgcccatttggatattggacagccctagttcacaaaaggtttcgattttaattcgttcggaataggttatactagacaaaagatcagctcctaaaagatgggtttgtggtaaacaccattttaaaggaagctgatcttttttgtccgaacagcgttcggattaattttacaatctaccttataccctctcttaaaagttgtctcaggaatcagcttacatccaagatgctttcaacacttcaaaagcaacactttttagaattaaacatcagattgatttaatagaaggtaattaataaaggtataagttatgtatttttatataacttatactttaataattgacttattttttgatataacttatactttatatatacaatacagatggaggtttcttatggcaactacgttaactatcggtaattttaaaggcggtgttggaaagaccaagatggcgacaatgcttgcattcgacaatgcccttatcagaaacaaaaaaaccttagttctagatttagatcctcaaggtaacgcaacaaagatcttagctagaacaggtggtctttcaaaaattcaatatactatcacagaccaaattattgatcgccacagtaaaagatacacagaaacattaaaagcactcgcacaagagtctccagataaaggtattcaacaactagaagcagatccacgcgctattatatatactttaataccagaggaaagagcagtctcactggaccaatgtatctataatattcgagagaatctcgacatgattggctgcgacactgcatttagaaactttcctgcatttattcgcacgtattcaaacgacgagcaagaacaagtacgttttattgcaaatctaattaatgatttaaaaaaacaatatgatactattttcattgatgttccaccgactatttcagaattttccgataacgctatggccgcatctgattacagcataattgcttttcaaacccaagatgaatcctttgatggtgtgaataaatatattggctatcaaaactttatggttgaacaatttaatattaatcttcaagttattgctattgttgcttgtatggttgaacctgatgataatcttgatcaggaaatttacaatgaggccaaagaagcgtatggagatgtcgttgctgatactatcattacgcaccaaaaacgacttaaaagatactcaagagaaggtattgatttaaaaacatataaaaatggtaactttgatcaatgggacttcaaagctcataacggattcaatgaaattcttggagagattgaaagtagagatcaatatttgaaatcattataaggagtgagctaaatggttgtaagacaatttaacactgacaatacagaagaaaaaaaattcacacgattactaaataagccacaatcaaaagttcaatcagtagaaattgccggcgaatattcatttggtaccggtacaacaatgaatagtagaaaagcaacatctaaaacaacaacaccttcttctccagcgttagaaaaaggatcaaaaaagcaaggtcgccctgttgaaataaaagatgacagataccaggtaacacgtcctaagaaaatatcaccagctttagaaagtaaattatctctattgcaagattatatgacagaatttgctactacaactaaaagaatatcatttgataaacttgttaacactttagctgattcctatatagatacgagacttggtatggctaaaagcgaacacttaaaatcagaaattgctgctgaatttgagaaaataaaaaaataaattatatttatacacaagcgaaaaaggtataagttatacacgctctaaagcagaaagggtataacttataccttttaatttgttgaatatcactttcacagcaacaaattaaccaattccaaaaacttataccttatacatttaatccatttaaagtataagttatatctagtaaaaccgagtataacttatactttaattatagttgtcccttgctatacttcgatataaatgttattttcaaatagtaaataaaaagccatcacgaacggtaattcgtgatgaccaactttaagaagttatttgtctgtaatttcttctaaactatgtctttaattataggctattttgttcaaaatagcaatataaaaaggcttgtttgagtatacataaaagtaggtcgtgcggcttttcaaaagagattctggtttaaccaggctcgcatttgcctactctaaaaacactagagcggactcgcaaatgcgggttcgctctttttaattgataaggagatctaacatggataatcaactgaactattacaacattaagcgggaatacgcacttaaattcttccaagttcctaaggtctttatgacaaacgacaaatataaaaaattgagtgctgaagcaaaacttgctttcgccattctttctgaccgcctccaactttcaatcaaaaaccattggttcgataaagccggcaatatttattttatttacactggcgaacaactagagcagattcttggttgcggacactcaaaaatcacttcaatcaaaaaggaattaactgaggcccaattattagttatgaaacgtatgggacaaggtaaagcaaatcgtatgtatttacttggaccggaaattactgataacgatatttatggcatcgatcaacttgaaacagctgaaaatccactcgcagaagaagttgtaaacattgatttaccaacatctatgaatgatggacagcctgaaacccttgataaatctagattgctgaaaaacagtaatctagattaccgaaaaacggtaactagtgatactgatattaataatactgaatatcttaaaaccttaaatacagatactaaaaaaacagatactctaacggatagtcctcaaaatatcaagcagctacaagacgctgcgctgtttgaagtgcaattagaaaacgacaatatcttttctaaacaacaacttttagccttaaaactcttatcaaacggagattttgaattgttttgtactgttcaaaaaacaattctacgtgccaaaaaacaagcattaaacagtcatcagatacaaagcagcttgtttgatttacaagacgaagacatcgaccaacctgtttatgatgccttaatgcgaattgtccaacacgtacggttgggtgcaatacaggatttaaatagctatgtatttagcactatgtttgatcagtttgagcaactaggcagtaaacgtgccataacagcatataaaactagtggggcaactatcacctgggagtaacttttaaggcgctatcaggctaattattagtacccagggtaatttttattaaatttcatgttgcaacttaattgtctgctatgtcatgatgtacacgaacaaagcgaacaagagttcgttaaaaagggttaaataccgtatatacaacgtttgaaaaacataagaagctttattttcatgttaaaaatttaattaactaaattcataattgttagcggttaataaattgtatgatttgttaatttattaaaatttgtcgttaatcggcatttagtttaaatttacaaaaatattggaggtagtagcatgaatacgctatattttcacgccacatttgtcacttagttcgtgaattgcaaaataaattcttaaaatttatattgcaattaaaaaaacttaatggtaggtattaatgtatggcgagtaatacaagcatttaagcaatggcgctaaattagcttatatggtcctcaaagaccgtttagagtattctttgcgtaataactgggttgatagtgagggtcatgtttactttatctttaccaaccaagaactaatggacttgtttaattgctcaaagggaaaagccatcaaaacaaaaacagagttggaatcaatcggattactcgttcagaaacaaatgggctttaacccgaaaactaagaaaaatgaaccgaatcgcttatatctgtccaagctcgatgtgaaagcaaccgatgtctatttacgcggcgaatttggtaaaaaaagctctcaaacccttgctacgagcggaagttcaaaaaatggacttaatctatatagagaacctaaagaaagagacaaaaacagatgcaatatagatactcaaaagttggacttttccacagccaatttctcaccagcagaaattcaaaaacaaaaccaggatctcataaatcatgctaatgacttcttaactgatgaagacagtggcttacccgttttcttagaacccgaagccgtgaaattacttagcttctggtgccgtaccccacaacaaatgcggcgcttcatcggcattatcttaaatgctaagtaccgagttgaaaaggatcatcaagatattggcgtcataatcccgctttacgacgaagaactaaaacctttgatgactaaagccttaagacgctactttaacgccctaagaagcaatgaaaagcatatcaagaacgtggaaaactacttgtacggcaccatgcaaaacctatttggcgtttggtggaataaacaagcggctagagaatatgcggccaaacaccccgaagaacagaacactgacaatgagcgttcttgaaattaaacgtcatatggactcatttaagccgttttaagtgttgcatgcataattatattaaaactgctttaaaatcgtttagaagcaaaaataggtgccttaagtggttgaacaggtgatgactgaactaagtgaaagtgaagggagctttttaaatgaccaaaccaagcaaagaagtcgaaaaaatagagcaattgttggctgacccctggacagtcaatatttaaggcatttgggaacaagcggcacataatccagaccctgataagcgcaagttgtttgacgcgttacacacttacctcttagataaacggcaagaaaaaaattatcaacgaaaagcatttcgtgatttaacatggatgagtcaaagaatcagtggttggaatgaaaaggaggcacaaaatatgactaagacacaagcatatatggacaagtatcaatttacagttgcagaaaacaaacggtttgctcgaacaaattttaccaagctagtacacactagtgcccgctttgaaggcgtaaataccactttgccgcaaacacaaaccattatggacggcatgagtgtggcaggcgttcctgttgaagatattttgacaattgttaacttaaagcgtgggtggcaatatatcactgatcaaaattcctccttaacgttaaccatggaaaaacaaattaacaagattgtggccgcggaagacgccttagtaccaggagaattacggcaaggaaaaggaggagttgatttaggcagtgaagacttttttgaaccacccttaattaacgaaaaacaagaacaatcctttttacaaaaaattttggctgatccgcaaacaacgaccactgataaagcattgactgttatgtatcataatatgcgccaacaaatcttttgggacgggaacaaaaggacggcgactttaagtgctaataaaattatgattgacggtggtgcaggcttaatcaatgtgccgttagataagtgggatcaatggaacgaactaattgccaattattatcgaactaatgacatggctaaaattaaacggtggacatatgacaatggcattcaaggattacaaattagagcaaacttagagcttaaatcagtcgaagacgaaattggtaaaagaatccaagaacaattaaaagattttgctaaacacaatccagaaattaagccaaaaaacaatcctgaaaataaaaacgatcggcctagttattaggttgatcgttttttaatttatccggtttatgggcgttaacatagtcagcaaatgtttttaaaagttcttcggtttgttcgaccgagaggttattagcttgaaagtacttttctaataaagcccctttttgaattaatcggcgagaacgggctttgcggacttgccgattttcatagtatttagattgtcgtaatttaaaatcttcccgatcaattttttgttttaaacgcgcttgctgctcgactagtttttcatattgattagacatggaatttccccatctcgtatggctaatgatctacggactttacctttaaaaattcagaaaattgcttagctaaaagcttaatctgatcgttagacaaattagcataatctaaatttgcttgactaataatttgtttacctaatcgttgttcaatcttatttttttcgtccttgattttttggttaagggcttttaatttagcttcttgtttttctaagttactttgcgacatgattatccctccaatcatatttgaaaataatcatggacaccatatcataagaaaaacgttaagtcaaagtataaaagttgaaatagcgaagcggaaggcatatactaaaagtaaattcaggagaatcagcagaccgagtgaaataaggtcaatgcgcacttacacacaacaactaaagttggttgtattattgtgctaaacccttgtatcagaagtcgccgttggcgacaacaaaagcaaacccataaacctaaagaaaggtggtgaccgacatggcaatttttcacatgagttttcaaaatattagtgctggtaaaggacgtagtgccattgctggagcaagttatagaagtggtgaaaagttattcgatcaaaaagaaggtcgaagctatttttatgctcggtcagtcatgccagaaagctttattttgacaccaaagaatgcgccagaatgggcgagtgatagagagaaattatggaatgaagtcgaaagaaaagatcggcgagcaaattcacgctatgcaaaagagtttaacgtggctttaccagttgaattaagtgaagacgaacagaaagaattattgacaaaatatgtacaagaaaattttgttgatgagggtatggttgccgacgtagcaattcatagagatcacccatataatccgcacgctcatgttatgctaactaatcgtccatttaatccagacggaacatggggattgaaaagtaaaagggaaaatatattagatgaaaatgggaacaagacttatacaggaaatagtcgttttccaagatcaagaaaggtgtggctagttgattgggataaaaaagaaaaaattactgaatggcggcacaattgggcggctagtgtcaatcaagttttagagcaaaaaaatattccggatcggatcagtgaaaaatcatttatcgagcagggaatagatgatacaccaactcaacatgaggggatcaatagcaagcggtatgaaagaaaagaatttaaccaacaagtaaaaaactatcgcaaggccaaagccagttataaaaacaaccaagaaaaagtggttctggtgcaaattttcctcgctgacttgattttagtatactgggtgccaagaaacgagggattgcgcgcatgaatcactttaagggacgccactttcaaaaggacatcatcttagtagccgttggctactatttcagattcagtctcagctatcgtgacatcgttgaattgcttcgggatcggggtatcactgttcatcacaccacggtcatgcgttgggttcatcactatggccccatctttaaggctctatggcgtcggcatcaaacagctcacgctaaaagttggcgaatcgatgagacctatattcgagttaaaggccgttgggcctatttgtatcgcgctattgacagtaacggtttgaccatggattttgagctacgaaaacaccgcgattataccgcatcctatcactttttgaagcgtctcttgacgaccaatggtcggcctgatcgattagtcactgatcaatatcgggcaacactgaaagcagtgaagcacctgataaagcaagactatttgagcaaatcagcccaccaatgttccaaatatcgaaataatttgattgaacaggaccaccgattcattaaacgtcatcgtgtccgctcagcaagctttcaaagcattcgaaccgctagtgcaacgttgagcggtgtggaaattgttcacgcaatacgcaaaagaacccgacgagagttaagtctcatcgggttctcagtcgtggacgagttagaagcattgttagctgtataaccttcaacagaggatcaatagctggttagatggtcatctctcagactgtttgcaccagatccatattatttgcttgatttgtggtaaggtaatggcattcataaaatgatgtgcggctatttttaaaagacggcagcgatttgtttgtgacaattattcatgggcgatatgaggatcgaaatgtgtaaaataaaatgtaagacgaaagacaaggaatattgagaggagggcaggtatggcaagtttaaaagaaattgcagaacgagctaaagtttcattatcaacggtttctcgcgtactgaactatgatgcgacattagctgtcactgaagaaacaaaacgccgggttttttccgcggcggaagacgttaattataagaaaaagtctcctaagtccaaaaaaggtcggattggggttgtcacgtggtttacacaggtacaagaggtgaaaaatgcctactacctgtcactacgcgtcatgattgaggacgctttaagtgcagctaacttcacaaaatcgactttttactatggtgaatcttggtctagcttacaggagtgcgatgccgtgattgcagtggggcattttagccataaacagcgcgaagagttgaaacaaatcaaccccaaagttgtcattgttggtgaaaatgcgcttcgcgacggcattacctctgtcgtaactgacaatgagttttcaattgagagtgtgctagaaacctttattgatcacgggcacgataatattggcatcatggttggtaacggtcgcacgagtgacgatcaagaaaaaatctatgacccacgtttgggagcttttcgacgctttttgaaatctaaacagttgtatcgttcgcaaaatgtttttcaaggatcggtcacgcctgaaaaagggtatcagatgacggcgcgagcctttgaaaaactaaatgacgaatttccaaccgctctttttgtagcaagtgacacattggctgtgggcgtccttcgttatctcaatgaacatcacattccggttccgcaacgggtggctattgtcagcttcaatgattccgcaacggcagctgcaactttacctgctttgagttccattcgtgtctataccgatttgatggttcagcaagggattggcttaatgacacagctgttaacggctaaagaagatctgccagcaatctgtctgacggtcggcacatcagtcacttatcgtgaaagtagcgattgaccatcatgtaaggtcattttatttttaaataaacaggattagtcagacggacagtctggctattttttttggaaaaaatgaaaaactaaagatttgctgattcaaatcttaaagccgtgttacccctttaggaaaacgaattatatttacctgaatactcaaaaaaataaacaaagaactccgataaattggcttatatagaaaatattttagtaaaaaatcgttgacattcattttcctagagactataataacgacagtcaatgaaagcgtaatcattgcaaactaaaaaaattatatgaatcgaggggttttatcgtgatggacaaattccagaagcgcattgagaaattgcgaccggtttttgaaaagattgctgcaaacgcatacatttctgcaatccgtgacggcttcattgctgcaatgccgatcatcttgttctctagtgtctttctcatgatcgcgtatgtaccaaatgcttgggggttcttctggccaaaaggtgtcgagaacaacctcatgcttgcttataactactccatgggtctgttagcactgtttgtggctggtacgacggctaaaaacttaactgacaccaaaaatattcagttaccgaagacaaatcaaattaacccgatttcagttattatggccgcaatgatttcattctttattttggcggctttgccacttaagacaggttccgatatgacttatatggggactcaagggctgattgcagcatatctggttggcctaatcatcccgaatatctactatgtttgcattaaaaacaacatcaccatcaaattgccaccacaagtacctggcaatatttcacagacctttaaagatgtcattccaatggctgcctcggtgaccacgttctgggcagttaccatcggatttaagacatttaccggtaccaatcttcccaagttcatcattcaggttctttccccattgttcaaagccagcgattcatatcttggcttggcattgattgccggtgcgatggcattcttctggttctgcggtgtgcagggtccgtccattgtttcaccagccgttacgccaattatgattgccaacacggctgccaacttacagctatatcaagccggacagcatgcaagtcatgttttagcctataacacgatggactttgttatgaactttggaggcactggttcgacctttgttctagcttatctcatgctcctcttcgctcggtcaaaagaattaaaggctactggtaaagcggcgtttattcctgggacattctcggttaacgagccggtcctgtttgggacaccgattatcatgaacccaatctttttcctacctttcatcctaacgccaattcttaacatttggatgtataagttctttgtcacaactttgggtatgaattcaatcatgtacacgatgccgtggacactccccggaccaatcggactaccagtagcaactggttttgcaccattgtcgttcgttctggttgcgctcatgttagttgttgatattgcgctttatctaccattcctaaaagtttacgatttgcagttggttgcagaagaagctgaaacggcggcgcaagaagccgcagctagtgttgctggaaatgggacacaagtggttcaggctgcgacagacgccattggtgaaccagcggcagccctggccggcgggtccgatgtgacaattgatgaatcgaaaactaatggattaagtaaaccgaccaacgtgttagtgttgtgtgctggcggcggtacgagcggcatcctagccaacgcgttaaataaactggctgaggagcgaaagattcccttacaagcaaccgctcgtgcttatggtcaggacatggatctaattgaggacatggatttagtcattctggcgcctcaaatggatagccaaaaagggaatttaaagaagattactgataagtacggtgtcacgatggttacgacaaccggccgtgagtacattcagttaacccaagatggcgataaagcactcaagtttgttgaggcaaacgctaaataaacgaggaggaccaacgtgaaatttcctaaagatttttactttggcggtgcaaccgcggcgtatcaagtcgagggcgcaacgcatgaagatggtcgcgggccgattctctgggatccgtttttagagaagcaaggtacctttagcccggatccggcttgtgatttttatcatgaataccccgaagacttacggctttcgaaacagttcggattgaatgcgattcgcgtctcaattgcttggtcacgaatatttccaaccggctcaggcaaggtcgaaccgcgtggcgtggccttctatcatcggctgtttgcagaatgtaaaaaagacggcgtcgaaccattcgtcaccttgcatcatttcgactcgccgttaccgattaatgagtcaggcgattggctaaatactgaaaacatcgataaatttgttgattacgccaagttttgtttcaaggaattccctgagattcattactggatcaccattaacgaaccaacgtccatggctgttcagcagtggacgacaggaacattcccaccaggtgaaaaatataatttccataaaacttttcagtccgagcataacgaaaacattgctcatgcacgggttgtcaatgcatataaggaaatgaaacttcctggcgaaatcggtattgtccacgcgcttcaaactgtttatccgtttgaagaaggcaacgctgctgacattcacgccgccaagaaacaagatacattggataattacttgttcctagatggtacgctggctggccgttattcagatgaagtacttgatctgatgaatgaaattttagatgccaacaagcaagcgcctattacaatcactgaagcggatgaaaaagtattagctcaggcagcggcacagttagactttgtcggcgtcaattattatttcagtaaattcgttaaagcatatgatggcccttctgaaacggtacacaacggcacaggtaaaaaaggctcatcaatcactcggctacgtggtattggcgaggaacaggttcgtcccggtattccaacaactgattgggactggccgatttatcctaagggcatgtacgaccagttgatgcgaattaaaaacaattatccactcgttaagaaaatgtacgtcactgaaaatggtactggactaaaagaatcgttgcctgaggacggaagtatcattgatgatcagaaacggattgaatatgttgcgttacatttgaaggcgattcaagaagcaatggcggatggtgccaatgtatgcggttacttcatatggtccttgcaagacatgttctcttggacaaacggctatagcaaacgatatggtttgttcttcgtcgatttcaaaacgcaaaaacgttatccgaaaaaaagtgcatactggtttaagaaactaacgtcgacgcatgaaatacctagtactgatgcggttgatcaagtgagttcacgctaaacgatagagggagagaatcatgacaacaaaagaagaaatatcgatggctggctttgaacttgttgcgtatgccggcgatgcgaagacagccgtcatgaaagcattgaccgcggcacaaaacggtgaatttgatgaagccgagaagcagttgaaagatgcgcagaagtctattgatgacgcgcacaactcacaaacaaagatattggccgaagaagccggcggagctgacatggacgtcacgttcattatggtccatggtcaagataccttgatgacgaccatgctgctgattgacgaaacaaaatattttgtcaatgttttcaagcgattaaaggtattagaagcaaaatagaaaaaccattatgacaatcagcgatcattcacgctacaaaatcaaaggtgtgaaaactgaatgttatagtgggcaaattgacagtcaaatagaatggggtggcaacaccgcattttgtttgtataaaaatgggtctacactttctggtgttgagaaataatcaacactgaacgtgtagacccctttttgtgggatcgggcactactattcatctgaacttgagttaactgttatttgttgctcgagcaacatggtatatacgtcattttcgataaatgaatcaagcatgcgaacgtttgaaaaaatctgcaaattttcttgatagtgttcttctaattttgaggcgctaataaatttctgatcctcaggggtgagttctgacagaattcgcttgaaggcatttgagatgaccgtggagatttcctccttggttagtttttcaaatttaatcttttgatcaattcttgaatatattggaaggcccaccgtggatgcaatagtttcctcatcgttgaaattagacgttaggatgaatatgcaactagatacatccactttgtaattgatgtcctcgaaaataccctcatcaaacatttgataaaatacgttatataagctaggggacaccttgtcgaattcatcgattaggacgatgtttgattcgcgcgatagtaagtccctagccatggatggccgagcatgttcatcaccgaaaacatatttgaaggcttcttcggtttgcatcattgaaaactgaattcgtgttaacttaccatggtagaagttgctaatattcttagctaattcagttttacctacgccagagggtccgtagaacatcatgacagtgggctttttctggtgatggtatgccgctttgtacaatcctacgcacgatgcgtgtttagcattgttttgtccaataacttttccggttagtagctgagagtaaagttttgtgacctcggtcgtacttggagaaaaatatggcgacgttacttcaacaatctcatcctcatcaaatttggatctgatggagtattcaactcgtttcggaggattctgaatatacaagttttcgatgtcgtggcctagtagtacaatattcgagaaatttgagattacgtgttctgtgaccgatgcaaagtcatcagcaaaaattaccacattaccaattttatcgcggctaaattcggcatctttgttgcccatagtatcgttggcgcggaccgttacattatattgacgaatcagctccataaatggtgtgtaattgtcctctacttgattttgattaagtagggagcggaaatctttgctcgatccgtagaatagttgaatatttgccattagcgaacccccgctaaaacgacatcgaaaacatcaagcgatttttcgtcgttagaatcagcatcctgatgggattgagcctgcttggctaagccgctaaatccgacttcggactgctgactgtcaagattgaactctgtttcaaaatcgagttgggatagctttgttgtaccgacgtgaatagcatacagaactaagttcattttaggcaaatcctgaatacgataattgttcttaaaagcatcaatgttaaaacgaaataccttttgagtggtgatggatttaccaaattttgaatcagttttttctccgaccacttcgtagtaacctttagagtttcggatgccactgttcatttttgaaattgccatggtaatatctggattgtcgagctgttgatgtccctccatcatctctgttaggggcgctatagttgcgaagtaagtcattgaatccttcggaattgagagtgcgtaatcttccttaatatctaataatggcgttccccgttttgattctgcggactctaagaaatcataaagcaaagaattctcaatgacggttctggcaattttacttccgttgagagatccatttgctcccatcattgagttgatgccggcggataagccagagatatgactcaccagtttattgactccgacatcttcgtctagttgtgcttttatgtcagcatctgcgccaattttcccagtcatagatcgaattgtttcctcggttctcgtcagatgtcctttttgacgaacctgtaataaatctacagcggaggtttcatcaaagtagatgatttttcgtggcaggcttttcttcatgtgtgttccgccttatctatataatttttattgattcatacgtattatagcagagtagaaggcttttatggtcgattttcgaacaaacgttcccgaacgtggtggtcttttaattcactcatttagagactaagaagttttgaaatttggattttagaatctgatagcatatattgatactgtggctcgctaggtgtatactaaacacatggaaaatcctaagttcgagttttacacgcgtccaagtggacacaatgaattccaagaattcttagatagtttgaagccagtggaaaagcagaagctggtcaccgtcattgccaagacacagaaatttggtttgcaagtggcggcgcgccaaatgtggatcagaaaaatatcagatggcatctttgagcttcggacaacaggatcgaatatccagcggggcttgtactttcacgttgaaggtccgcgttatgtgattacgcatggcttcacgaagaagacccagaagacgccggtgtctgaacttaatcatgccaaagaactcaggacagaatactacgataatttgggaggtaagtaacatggcaaagaacatttcttttgacgattatctcgctgaacaacttaaggaccctgaattcaaggcaggctttgatgccgaatctgccaaacttgagagcgcagtggcgttgatgagcgagcgcgaacgcgccggtttgacccaacgggaactagccgagcgggcagatgtgccgcaatcaacgattgcgcgcatcgagcatggccagaacactagctttgataccatgagcaagattgcctttgcactgggaaagaagctcaaggttgaattcacttagaatatagcgatgtccccatgtttgtgagcgtcagttttcggaacttcgagactggcgcttttctttatatgattgatgcgtgatacttgaaacataatactgacgaatcgaggctgtttcatgaaggaagcagatcaaaaacgagccgccacggcctttgtcaagcgttggcaagatcgtggtaatgaacgacaggatagtcagaccttctggttggacttgctggagactgcctatgatattcctaatcctggtgagtacatcagttttgaagaccgagtaatgctggatcacaccagctttattgacggtttcattgacacaaccaaggtgttaattgaacagaaaggccgaaataagagcttgtttgacggcatacggcagtctgacggcagtttgctgtctccatttgagcaagcaaaacgatattccgccaatttaccgtactctaagcggccgcgctggattatcacgagcaactttacccagttcttcgtgtatgatatggagcaacctaatggcgagccggcagtgatccagcttaaggacttaccgactgagtattaccgtttggactttatcgtcgatcagttgaatccgcatctcgacaaagagatggaagtttcaatgcaagctggtgagttggtcggcaagatttacgatgaactgttcacgcagtatcgtgatcctactaatgccagcagtcagcgtagtattaacgagttgtctgtacgtctagtgttttgcttgtacgctgaagatgctggcatttttggccgtcatggtatgtttcacgactatctcaatgaatttgagacgcggcatctgcgtacggccttgatagacctgtttcgtgtgctggatacgccaatcgataaacgcgacccatatctggaagaaaagttggctgagtttccgtatgtgaatggcggaatgtttactaatgaggaagttgagattccacaattcaccgattcgttgcgcgctttgattctagatcaagccagcaaggagtttgactggtctgagatcagcccaacaatttttggtgcggtgtttgagagtaccttgaacccagacacgcgacgtgaaggtggcatgcactatacctcgattgcaaatattcataaagtcattgatccaatgttcctagacggtctccgaaatgagctgactgaaatcaagcaaattaagcaacgtaagaccatgattcagcgcgcgacagattttcaagcccggctcggtaagttgcgtttctttgatccagcgtgtgggtcaggtaactttctgactgaaacctatttgtcattgcggaagctcgaaaaccaggttatcagcttgatttacgggaatgaaagcatgttggcagttgatgacgatttggtcaaggtgtccattcaacagttttatggtattgaaatcaatgactttgcggtgtccgtcggcaagacagcgctgtggattgctgaatcgcagatgatggaagaaacggcggcgattgtttacgcgaatatggactttttgccattgaagacgtacaccaacatcacagagggcaatgccatccgtctcgattgggaaacggtagtcggcggcgagagaattacttacatcattggtaatccaccattttatggtcacgaaaagcggacacgcgcgcaagcagcggacatggatattgctttccatgattttaccaagtatggcaagctggattatgtggcggcgtggtacaacaaagcggctgacttcattcaaggtaagacgaccgaggtcgcctttgtttcaactaactcgatcacgcaaggtgagcaagcgccaacgctttggccaaaactattcgagaagggcattgaaattcaattcgcctatcggacattccgctggagcagtgaagccaaggagaaggcgcaagttcatgtggttatcattgggttcaccggctacccgcgcaaggagaagaagcgtctgtttgaaggcggccagatgaagctggttgaccacatcaatgcgtaccttactgagggagcgaatgtttacccacaacctcggcgaaagattagcgtgtctggttctcagtttccaatgatgtcgcagggtagtaaaccagttgatgggggtaacttgattctttctccaaaggaacgggcggcgttaattaagcagtacccgcagacagaaagttatatacgacgttatgttggctccagagactttatcaataatgttgagcggtactgcatttggttaaagggtgtatcaccaagtcaatttcgttctgttccaccaattatggaacggttagcggccgtcaccgaagcaagattgaaaagtcctacaccgtcagttaaagcattggcggaaatgcccatgttattcactgaaattcgtcaaccggattcaaactatctagcggtccctgaggtttcgagcgaacaccgacgttatgtgccgatggggtggatgtctccagcggttattgccagcaacaagctgtatctcgttccgaatgccagtctgtatatgttcggtgtgatgacttctaatgtgcatatggcgtggatgcgtgcggttgctggtagaatgaagagcgattacagttactcgccaaccgtctatgcaaattttccgtggccagaagttgatgataagcaaaaggcgcagattgaacaaacagcccaggggattctcgatgcccgtaaactttacccggatagtagcttagctgatctctatgatccgttggcgacagttcctgaactgcgcaaagcccaccaagataatgatcgagccgttatgcggacatatgggctgacaattaaaggcaccaccgagagtgataccgtcgccatgctgtttgaacgttatcggcaactgaccaagtagaattgcgataaaaaggactacccgtttagattgggtagcccagagtgtttctatttggcctgcggggcaactaattcaatcttttcagccttgtagtagattgggttgccgaccatgcttggttctaaaccggtaaagcggcatttcacgctgttacgtttcatgatttccgcgttgttgattggacagtcgagaccagcaacggtgatctgagtggacttcttacgatgttcaccttccagaatcgtgacggaatacttatagccgacaatttcatccgtgttgaatttccgcggtgtaccatcattgcccatgattttgttgccagaatcatcaaggcgttcttcagttgccattttaggggtgacttcgtctagttcaaagatgttgccgatcttggagtagtcgaaatcgcgcatgcttaacattttagccatggtagattgtaaaattatttgggtctagaatttttggtgttggaaagtatttccattccaaaagtactaggccctaatttaaaaagccattgataatggatcaaaagcgaccaatagggtataccctaatggtcttttttatttctttgctatactaggaattacaagtgttcattagaactgtccaaaaggagaattgaaaatggctaaaatcggttatgcacgtgtgagttccaaggagcaacatttagatcgacagttagcggctttaaaagacgttgataaattatttacggataaattaagtggggctaacactaatcggccagaactacaaaaaatgctggcctatattcgtgagggtgatattgtaatggtcactgaattagatcgcttaggcagaaataacctggatttaactaagatcatgaacaccattcaaaataagggtgccaccctagatgtgttaaatttgccgtccatgactggaattactgaccctaatttacgtcaacttatgactaacctcatcattgaattgtataagtaccaggcggaaagtgaacgtaagcggattattgagcggcagcaacaaggtattgccctggctaagcagcagggtaaatatcatggtcggaagcctcaatatgccaaagacgatccccgcttgcgacatgcttttaaactttatcaaatgggtatgagtgatgtagatgttgcccgtaatacagggattaaacggacgacctttatcagatatcgaaagaaattcaatatacaaagatgatgtttacatgagagaatcatagcagagcggaccacttgaaacttctaactccactaaaatccgagaaatgaccaagaaaaatgataactcttcgaatattgttacttcaaattaaaatcaaaaatgattaccttaaaaattgaggttttttaattattcctttggcaccgataataaatacattcttactcattttattctcctcagactaatacgcatcatttggtataatcatgattttgactgtcctaaatagaatccccaaatcataaaccaaactactttttctaatatatttcaaatctaattcaaccatttcgtggaagctgatactgttgcgcccgctaacctgccacaagccagtacaccccggtttaaccattaggcgttgccaatcgtaatcagtatactctttaatttcacgttccaatggtggtcgcggtccaacaagcgtcatatcgccaactagaacattccacaattgtggtaattcatcaatactatacttgcgaatgaaacgccctactgatgtaattctagggtcctctttcattttaaacatcgcaccttcaacctcgttatatttgagaagatcttttaacttctgatcagcatcactacacattgatctaaacttgtacattttaaatttcttttgttttagacctaaacgagtctgtgagtagaaaaccccacccgctggatcatcaaccttaatccaaatcgccagtaccaaaaatagcgggcttaatagaattaaccctgccaaactggcaacaatatcgaataaccgttttaagccgcgataaatataccgctgatctaaaacagcttgattaaaaagcattacttggtgtgtattttcaatcgacgcccgactagtgtcctccttttgtatctccatgctttatttcccccaatttaaactatttcttggactctttggcaccatagtagccaccatagtagccacccgtattttctgctttaacgcggttcataattgttcctaaaattcgggcattaacgacttctaacaactcttttgccttggcaaccgaacccttttcaacaatcccttgtggtaccaccagaattgtcccatcaactttgctagcaaggatttgtgcatccgtcaccgatactacaggcggtacatcaaaaatcactaaatcaaagtgcttcgttaattctaaaatcaatttatccattttcttagtattcaatagttccgatggattgggtggtactaccccacatggtaaaacaaataaatgatcaaccggtgttttttgaatggcactatttaaatcgaaattttcttccgttaataatgacgttaagccttttttattcggtacttggaaagtttgatgaactgttggtcgacgcatatcagcatcgactagcaatacatcaactccttgatcagcccaggttacagcaacgttagcactcaccgttgatttaccttgcgaagggcctgatgacgtgaagactacactgcgcaacttttgatcgattgatgaaaattgaatattcgtgcggattgtccggaattgttccgcaataactgaagtcggatcagttaaagtaattaaaccgaccccttcttgcatacttgcttgatctaatttcttttcttttctaaataatcccatttcttcttaccctcttctcgataagcggctagtgctgacactcataatcgcttttttgattaaatctttttcagcaatgttattcacaacgcctaagcttgttaagcctaaatcatccgttaggaagctttcgtctttaaccgtcttgtccgtcaactcacgtaagaaggcaatcccaacgccgagtaatatccctaaggcaaggccaattaacacatttaatttcttcttgggtgaaactggctttaaatcaggtttagcctctgaaataatagagacattatctgtcccactcataatcttgggtgcctttttttggaaagtttgcgctgttgtattggcaatatcagcagctgtataagcattatctgctttagcagtgattgagaaaacttgtgaattttgattatttgaaacgccaatcatgcttgcgatagttgtatcgtctaatttttgattgctacccttgttaattttcttagcgactgaatccataatgactggtttcgtaattaaatccttatacgtattgatcatttgtacatcggtttggacttgattccattggacatttgcatcaccgctttgcttgcgattaactaacagttcggttgaagcgctatattgtggtgtaatcaaaaagaatgtcacgataacagctaataatgtacataccactgtcgatgatagaattaagcggcgatacttgcgcaagatgccgaaaatctgttcaatattaattgtttgttccatgataccctccagaaattaattaacagttataactactttgtccatacgaaaagaagttaaccaatactggttagcttcttccgtggttattttaaatctagttgttttcttagaagtgtcgacatctttgatacctcagttggattcatgacttggaacgattgcccgtcaatcatctgcccagtccctttcaattgtaatgtcttgaagttcatcgcatccccataattttgttgaatgttcaagacatccttcaaggtgatattagtttgcatattattcgctagcacctgtaagatttggttatagtttgtcaccatatttaatgaagttgctttcttcaaaacagcttggacaattgcttgttgccggagttgccgaccaaaatctccgcgtggatcatcgtagcgcatccgtgagaatttcaaggcagttgatccatctaattgtaccgttcctttttcgaagtggtgcccctcataggtgaagtccaaatcattatccacggtcacgccaccaacggcatccactaattgttccaagcccttcatgttaaccaatacatagtaatcaaccggtacgtttaagaaggcttggacagtattaactgccattggaatgccaccataggcatacgcggcattaatcttagccgtctgaccatagccaacaattggtacccttgaatcacgggcgatactcaacatattagtttccttagtcgttggattaaccgtcgcaagcatcatcgtatcagtccggcctttttcggtccggcctagttcccctgtatctgtaccgagtaagaggatcgagaaaggcgtcttcttattcagttcgactttttctgaaactttgcgcttattttgtgtcttacctttggatttatacactgtcttggcggtttgattaacatccatatagaccttagctgcgaatgcgcccccggcaagaatcaataccccaagaacaactaaaatcacttttgttaatgtccaccctctgcgccggtgcttatggtgatggtgtcgcttctgttcttctgcagtcatccgtttcgtatcctcctcgaaaactaaacaaaaaaataatcaatcacattacatactatttatactacaatattttctattatagtataacttttattaaaaaggaaatccttttctggaatacaccttaataaaaaacacttagttttcacactaaattgtgaataacccccttaacattgggcggtaattcaatattcaagatttttaaataattaaatatttttaaagtatcgaaagtgaaagtggtttacgaaatctaagtccatcaaaaaaccgatatgtaaaaacattagtttgacatatcggttgagataaataattttaattttagagactaaaaataggttgtaatcatccggttgattcccgaattcttacaacctatataattggttaacgtttcaattcatatttgtgctttgtctcattaatttttcggctgtcattcattttgatcgcgccgacgcgcaatgaagtcatgaaccttaccgcgactggcgttaacatgcccatgcagtgcttcttcaatcacaacattcaagacagccccaaccatcagaatcgttgcggaataattcagccacaagagtaagataatcaccgcaccgattgcaccgtaactattccatgacgtgccgaagtaacgaatatacaatgagaaggcttgtgcaagaattaaccagccaaccgttgtcagtgctgcccctggcagaacacttcgcaatcgcattttcacattcggaacgaagaaatagatgaaaatcagcagtaggaacaaggcgatccccgtcactggccattttaaactactaaaaatattaacgtatgtcttaggaatgttaaagattgggactaataattccaaaacttgttgcccgaatgtaaaaacaacaattaaaccgactaataatagaagtaataataatgtactccccaaagaaatcaggcgttttaaaacaaagttctgaactttttcaacacgatacgcgcggttaatactattttttaaggcattaatccccatgctcgctgcccacaacgtccccaagatcccgacggacaataagccatcattgcgtttcttcaatagggactgcagaactggcataatcttgtcgaatatcgtgggcggcaccgccgtttggacgtaatccgccacactcattacatctaactggaagtacggtaagatgttcccgataacgattaatagtgggaagattgataataacgaataatatgcgattaccttcgaattatcactaatgcttgcttctgatgaacgcaacatcattaacttcaccacagcaatcaacttctgccgtctggataagtcctgttttaccaccggtaactggttttgattgtctactgtcatatgtcactccaaattctcttttacacattagtcgttctacctgaaaggcttattttcccgacttcttaaggcatgtttatcatttctattatacacgaattaactatgggctaatagttttctgaaagcaaaaaaagaaaccttctcattttagagaaggtttctaattttatagtaaatatttagcatccatttctggatcttgtgaggttagaatcttaggaccatctttggtaatcgcaattgtgtgttcatattgcgcacatggtgtgccatctgctgagacgtaatattcccagtcttcgccagggacttcttttgacttgatgtgccatgtgccacctaagatgaccattggttcaattgtgatggtcatcccctctttaaggcgcaagcccttgcccgcttcaccgtatgaaggcacgtttggttgttcgtgcatcgttggttgaataccatgtccaatcaattcacggacgtcaccgtagctgttttcaacttcggtatattgttggatggcgtggccgatatcacctaggcgattgccgacaacggcttgatcaatgcctaagtaaagtgctttgcgcgtatcgtccattaatttttgtaattctggtgcgatttcgccaaccgcataagtccagcaagaatcactttcataaccgtccaagttaacggtcatgtcgacactgacaatgtcgccttcttttagaattaagttcttccgtggaatggcatgtgccacttcctcattcacgcagacacaagttgcgtacttgtagccttcaaagcctttttcagatgctttggcaccgtgttgttcgatgtagtcgtttgcgaattcttcaattacccagctcgaaatacctggtttgatgatgtcacgcaagccgcgatgaacgccggcaataatggcgccagaagcagccatccctttaatttctcgttcagattttaatgtaatcaaaatgaaacctccaatattgttaccattgtagcctttaattgtatctatttctatattatacgctatctgccattaaaatggacgaatcgtcgctttttagttcaattaaccgtgaaagagccgttgaaccttttcttaataaggggcttttgctataatgccttatagtataattcgttaattgcggccactgagcgccgcgtacgtgaaaggatgtcccaataatggcaactgctaaagtagtctatgcaagtatgaccggcaataacgaggaaattgccgaaatcgttgaagaagccctcgaaagtttgaacgtcgacgttgaaaccactgaaatctctcaagcagatcctgccgattttgaagacagcgatatctgtatcgtctgcagctacacctatggcgatgatggcgatctccccgatgaagccgttgatttctacgaagatctcaaggatattgatttaactggtaaagtctacggtgtctgtggctccggtgatacgttctacgatgacttctgtaaagtggttgatgattttgcagccgtcttcgaacaaaccggcgcaacaaagggttcagacgttgtcaaagtcgatctatcagcagaagcagaagatatcgaacatcttgaaaaattcgtatcagagattgttgcaaaacagagtgcgttataagctcggtcagtatccgagcactaacctagtctggtgaatagccaacaagttggctgtttgccggacgtagctaggcacaggatactagcttataaagcacgtttcaaggcagagtgcgtttgaaacggttatgctttgagcattaactggatttgccgaataggtgatgcaatcacctatttggtaaatttggttaagcgcagaagtatgtttcaacaagcacgtttcaaggcagagtgcgtttgaaacggttatgctttgagcattaactggatttgccgaataggtgatgcaatcacctattcggtaaatttggttaagcgcagaagtatgtttcaacaagcacgtttcaaggcagagtgcgtttgaaacggttatgctttgagcattaactggatttgccgaataggtgatgcaatcacctatttggtaaatttggttaagcgcagaagtatgtttcaacaagcacgtttcaaccaatcttccctgggccgcggttacgtccctttttaccgcggcccttcttttggtcttttagaccttaataaatcaaactaggagctgtctttatggctttcattaaacggttagtgtttaaataccgcgattttttgacctatacgatttttggttttttagcatcgttggttaatatttttacttactgggtatttcgccacaccattatttggccgtatttactcgccaatacaatggcgtggtttgtcgcgaatttatttggcttttttaccaataagtcgcttgtattccaatccaaatacaccacgtttggcgctgtgtgtcgtgaagtgctttcgtttttctttttccgtggtgtatcctttttcttggataacggtttgatgattgtcgccatctccttcttagggtggcagagtatgaccgccaagattatcgatcagttaattgtcggcattgtcaactacatcaccacccgctacactttcaaaaaaacagaacaacaaatggcactccgggggcggattctccgtcggtacaatgccattttgaaaagaggtcacaatgattaaagccatccaacaactcattcaaaaatactgggaacaattaatgtatttggtctttggtgtcttaacaaccctagtcaacatggtcgttttcttcggattagaccactatacaactatcaattatctcgtcagcaacacgattgcctggttcttatccgtgctatttgcctttttcaccaataaaacgtgggtctttcagtcaaaatatacaactttaaaggacttttcccgtgaaatggctagtttctttttcttccgtggtatatcatttataatggatacggcaattatgtttgttgggatttccttattggtatggcccaacatgattgttaaagtgctagatcagattatcgtgattttagcgaactatgtatttagcaaatggattttcaaagatacttcggaggattaagatgatttcaattattgtaccctgttataacgagcaagaatcaattccgcttttctacgcagcagttgagaaagtagcggctactctagccgaccaccgcatcgaatacatcttcgttaacgatggttctgctgatgaaagcctggcggaaatgcgcgcgttacaggcacaagaccctgaacacgttcactacatttcattctctcggaacttcggtaaagaggctgccttgtatgctggcttacaagccgcaactggcgactacgtttcagtgatggatgttgacttacaagatccgcctgaactattacccgaaatgattcacggcattgaagtcgaaggttatgactgtgtcggcactcgccggacaacacgtgcgggtgaaccccccgttcgttcgttcttcgctaaacaattttacaagattatcaaccggatttcacaaactgaaatcgtggatggtgctcgtgattatcgcttgatgactcggcagatggtcaatgccatcttagagatgtctgaatacaaccgtttttcaaaagggattttcagttgggtcggctttgacaccaagtacttagaatataagaaccaagaccgcgttgctggtcaaaccagttggtcattctggggactcttcaaatattcattggatgggattgtaactttctcagaaacaccattagccattgcgtccttcgtcggctttttctcattcgtgattgccctgcttgcattaatcttcatcgttattcgcgctttgatttttggcgatccaacaagcggttggccatcactcatttcagttatcctaatggtcggcggtttacaactcctatgcctagggattgtcggcaaatacatcggcaaaatctacctagaagttaaaaacagaccagtgtatatcgtgaaagaaaagaaatagagtgcgtttggttgcacttagcaactgagtattacgacaaaaaacagtttgaatccgcacgtttatctcatcaaaaaaagcccttgccattatcagtcaaaatgataatggtcgagggctttttcaatgctcattatttaaacgcttctggtttttcttttgattggccaaaatgataagcaattgcatctaaaatccgttgagatgcttgtccatcaccatatggattcttggcatgggccattgcttcatatacggcttgatcatctaataattcaaccatggcatcatgaacttgttctggttgtgtcccaaccaacttcaacgtgcctgcttcaaccccttcaggtcgttcagttgtatcccgtaagaccaacacaggtttgcctaatgacggtgcttcttcttgcacaacagggttcaaatgcactggatagacgatttcaacatcatcatgggtttcaacaacttggcgcattaccttgaagacccgtttcattggttcaccttggttttcacgtcgatgcattgttactagaatcattcgtttgtcagcatcaacaacatccaagattgaatgattgtagtcgctttgaaccgtttgtttcaatgcatcaattgctgtattccctgtaatgtaaatagccttttgtgggtgattttcttgtaataagttggcttcactttgactggttagtgcaaaataaagatcactgagtacatctgttaattggcgattcatttcttctgggaatggtgaatacttatctcaagttcttagtcctgcttcaatatggccaatcgctgtttgattgtagaatgcactgatgcttgctgcgaaagtagtggttgtatccccatggactaatacgatatccggtttttcagttgcaatcactttatcaaggttcattaatacgttgctagtaatttcactaagtgtttgccgttgtttcataacgtctaaatcgtaatcaggtttaatcttaaagatttcaagtacttgatctaacatttgacgatgttgggcagttaccactgtcacagcttcgaattcatctgcgcgttctttcaatgctaatactagcggcgccatcttaattgcttctggtcgtgtcccaaaaacagtcattactttaattttagacacaaagctgcctcctattatttaataagttacccccctatactacatattttctaaagatttgccaatctttaaccaccttacaaatgaataacagtctgaatataaaaaaggacgcctttttaggcgtctctttttaaaaacattgcttcaacattcgtttgagcatcgcgtctatttctgcgtcactatagtgtaccaacttcgcattcgttagggtcgccaaacccgtaataatgatccacgcttcgttaataatgcgttcgtgttctgactcactaaccgtttttaacggttgatagtcctgcaatctagtttgcgtcagttgccccatgaaaagttgtgcttcatccttaccaaagtggttatcaataaataacgcacggtaaagttctggttcgattgtagcaaaatgaatatagccaatcccgagattgactaaggcatcatctgttcgttgttcttcactgacataccacaccaaacgcgccttggcttgttccaaaatggcttgcttgagattggccatattaccgaattctaaatagatgggttgtgtcgaacagtctagtgccttggcaaggctgcgcgctgtaattgcttttaaaccatccgctaataccatttcgtatgctttatccagaatttgctccgctttaatccgttttgtccgtgccatcgttcccactccttaaccgatcaatccgtttttcaatattatctactgtcactctaccacaaaattaaataacatgaaaacgtttttatctgttttacgagttttttaaatcgccatgtgctatgataaacatattaaatcgcccttaaggaggaatttttgatgactactttccaacataatcttgaaaaatacgccgctttagtcgctaaaacaggaattaacgtccaacctggtgatacagtggttttacaaatcgctgttgatcaagctgaattcgcccgtgatatgacagctgcttgttatgacctcggtgcagccgaagtgattatcaaatggcaagatgacgacatcgatcgaatcaatatgcaacacaaagccgaagatcgcctcgttaacgtgccagacttccaaaaacaagaatacgattactggttagcaaacaacgccaaacggatttcggtgatgtcgagcgatcctgataaccttaagggtctcgatggtgatcgggtcgctgctgttcaaaaggcaaacggtcaagcaatgcttaaagttcgccaagcaacacaagccaacaaaaatagttggattgtaattgccgcagctagtcccgcttgggcaaagaaagtctttcctgatatggacgaacaagccgcaactgataagttatggacagagattttcaaaacaacccgagtagataaagaagacccaatccttgcttgggaacaacatggtaagaaactgcaagccaaagccgctgaattaaacgctgcgcaatacaaagcactccattacacagcccctggcactgatctcacaattgggttacctgaaaaccacatctggatgggtggtcctagccgtagtagtgatggtcgttcattcgtcgctaacatgcctactgaggaagttttctcagcagctgatgccaacaacatcgatggctacatttcttctacgaaaccattgagttacgctggtaacacactcaacaacatgcaatttacttttgaaaacggtaaagtggtcaaagccaccgctgaagaaggcaacgatgtcttacaaaaactcttacaaaccgatgctggggtcaagagcctaggtgaagtcgcacttgtaccagatccttcaccaatttcacaatcaaagatcaccttctacaataccttatttgacgaaaatgcttcaaaccatttggcactcggctctgcttacgccttttcaattgaaggcggcacagatatgtctgaagaggaattaaaagcagctggtttaaaccgtagtcaagcccacgttgacttcatggtcggttccagtcaaatgaacatcgatggcttaacgcacgacggtcagattgtccccattttcagaaacggtgactgggctgactaatgattacatggctcatgctccttggcgtctgcgtttgtctaaccaccttcttcattggactaaccgcctatagcgcctaccagaaacaagcgattggtggtctaatcattgtgtgcgttgccggtttagtcttaaccgcaatcacggcattcttctactaccaagcactgacacatttataattcgaaagggtcgcgacaaaatttttgttgcgaccctttttgatgtgctagactgttggcatactttttgttcactatatcattattcgttagtaataatgattcgtatgtactggtataacaggttttatacaatgtttttgttttgaacaattgttcaaaaacgattgataatccttctcaattagctataatgaagttaaatcaaccagaggagtccgccattatgaaagaattatccgccagtgcaccactcgaacatcgtttccatttatcagaacgtttgaacattatccgcgccggcgtcttaggtgcaaatgatggcattatctctgtagctggaatcgtagtcggtgtcgcgagcgcccaccaaagtcagtacacgatttttcttgctggtatttctggcatgcttgctggcgccttttcaatgggtggcggtgaatacgtctcggtcagcacgcaacgtgatacgcagaaatccatgatgcggcttcaaaaagaagccatccaaaacgaatacgctgctgaagtggccagtctacaacggacttacgaatcaaaaggcttacccactccacttgcacatcaggtagcttcagcgttcatgcaaaaagacagtcttgacatcacactccgcgaaaaatacaatattgaattacaccattacttcaacccgtggcatgccgccttttcatcatttttctcattcatgttaggctcattgctgccaatcatcgccatcctagcaattccatacccttacaaagtcagtggaactatcggttcaattgttcttgcccttatcgcgaccggttacacgagtgcaacgttaggcaaggcaaaccgactcaaaggcgttttacgcaacgtcttaaccggcgtcttaaccatggtcgtcacctatttaattggtggttctatcggctaagcttcacttttaacctaaaatttgctatgctatatttaatttaatcgtcgccacggggcagttaatcacttcattaggtcaaagaagaagtgattggctgtcctttttttgtggccgatattattaggaggttctattgtgtggcatgggttgatttattgattgcaagattggcagaagtttggtgggcaacgactatgaaaatgagtggtgggttcactaagctcaattacacattactgacgattgctggcatgctcgtcagcttcggttttctaattcgtgcgacgaagggattaccattgagcattgcttatccggtttggaccggaattggcgcagtgggagctattttagtcggcatcatcttattcaatgaacacatttctttattaacctggctattcgttattttattagtaatcggaattctcggcattaaaatgacgagtggtcattaaaaaataggcttacccattttgggtaagccttatttattaacgtgttctaattgctaactcgcgatagtttgaatcaactcgattggtaatgccgttacatctttttcgaattgtagtgtccctttgccggtctgacatggtgcgacagcttttgcaaaatgggccatcggttgattagtgggataaaacccaatgtgccgtttattaatgccaaaatagcaaactgctttaggctgataatacccaaccaaaccataagccagcttcatttctgcgtccggtaacactgcccgaagaatggtgtgcattgccagtgcgagtgttcgatcagcatcagttgtaaggcctgcattatattgctcaataactgtcatcttatccccacctttattttgctctcattctagcatgaaaccacaaaaaaagcccaaccgaagttggactcttgaaaaaacaataattatttaacagctggtgtaccgaaccattcgatacgtgattcaactgtgtctttgattgcttttgtacctggtgcaagaactttacgaggatcgaagcctttttcagcttgatctttgttttctgcatagtattctttaacagcgtttgaccatgcgatttgttgttctgtattaacgttaacttttgagatacccatttcgattgctttaaggatttgttccttaggaatacctgaaccaccatgtaatacaagtggtaagtcaataacgtcagctaattcttgtaaacggtcaaagcttaaaccttgccagttttcagggtatacaccatgaatattaccaataccaactgctaagtagtcaggaccagcagctgctaattgtttagcttcttcaacgtcagctaattcgccagcaccgatgataccgtcttcttcgccaccaattgaaccaacttcggcttcaactgagatgcctttagcatgtgctaaagcaacgatttcttttgtctttgctaagttttcttcgaatggtaaatcatgaccatcgaacataactgagttgtaaccaacttcgatacattctttagcagcttcgtagttaccgtgatctaaatgcatgataacaggaactgtgatgttcattgacttgattgtttgttcaaccaagttcttgcataattcgtaaccacccatatatttagcagcacccattgatgtttggatcaagattggtgtgttagtttcttgagcagcacctaagatagcacgtgtccattcaaggttgtttgtgttgaaagcaccaacagcgtaatgaccttcacgagcagctttaaagatttctgtaccattaactaatgacatgaaaaagcctccagattaattgcaacttttgcgttgcgatttttgaatacgaatctattttaacatattttcacctaatataaatcataaatccgtaactttctgaaagtgaaagcgtaatcattccgcttgattattttacaccaattaaaaagcacactagttaatctagtgtgcttttacgacaattgcttcaaagtgcgcccggcgagaatcgaactcgcaacctatcgcttaggaggcgattgctctatccagttgagccacgagcgcctatgagtcatattgtcgcatctgttgttttaattgtaaagttgattttaataaatctttattcatccgttaaaacggcgttcatcgtttcttgacctaaaaagaacacggcaccagccgctaatagtatcgcacccgtaaaaagtgtaaaaatcacggctactgataccccctgctgaattagcgcaccaactaaaaatggcccaaccacaccgccaattcgcccgatgccagctgctaaaccactcccacttccacggacaagtgcaggatattgttctggggtataagcatatagcgccccccatgcaccaagattgaaaaaggataacagcgcaccggccacgagtaacatggcaactgagtttgcattgccaaacaataatgcactgagtgctgttccgattagaaagccacctaaaacacgtttccgcccccatttttcaatcaaccatgctgctacaaagtagcctggtaattgtgccaaggtcataatcagcacatattcaaaacttttaaccaagctgaacccttttaagaccatcacactggggagccataaaaacatcccatagtatgaaaagaccactaaaaaccatacgagccataacataattgttctttggcgatacgctggttcaaataaaacacgcaatcgttgcatgaatggtaccttacggttaatcgtcgtcggttcatgctcttgtttaacatgtttccgtaacacaagtgtgtagatggcgggcaatgacgtgatcaataagaccactcgccagccccaaactggaatgacaaaataggcgagtaaactggcaactaaccacccggctgcccaaaaactttctaacaatacgacagcccgaccgcgcgatgccgttggcgtattctccgagattaatgtcgaggctaccggtagctcgccacccaacccagcaccgaccaataaccgaagtactagaaatagactcaacgatgtactaaaggcagatatcccattgccaatcgaaaatactaataaggaacaaagtaaactgttttttcgaccaattttatcagctaaaatgccgaaaataacggcgccaaaaaccattccaattgaactgacactcccaattaatcccatttgtgcgctactgagttgccactctttggcaagcgcagcaatcacaaacgatagcatccccacatccattgcatcgaacaaccatgcaccacctgcagcccataaaagtgtcctatgttcttttgtcatcccgcattactcccttatgttatgaatggtcctatcatacaaaaagagtttacagatgtcaagacacctaattatgcattataataaatatttatctgtttaagcgctgcgacaatttgcttaaatcgttgttctgacgcgcattcaatcgtgtgtaaatgaatgccgtcggttaatgttgaaagtaatttctgatggggcattgtggccattttttgcataaagcatttgacatctgtcaaggtgccgattcccagttgaccggtcagttcaccatacaatggatgatcaacggtcacgtcgatcacgcgccccccattttcaacaatcgttgtcaattcgagttcagtctgcccctgattatgctgacaggcaacttgtgcctgatatggcattgtttgttgcgtctgcgtttggtcgtaataaccgctaactgtcgcaataatttgggccccttgtgcgcgaagtaaggcgatatccccaacaattgtctgccggctaactttatattgttgcgctaatactttggcactgatgggttgcgcactcttttgaattgcattcagaattgctgtacgtcgttcttgcgttgtcatattgccacctcgtcttgatttcttacgctatattctaagcgttctaaaggcaaaaagaaagtgggggatgaaacgaactcgtttttctgttaatcacaaattcaatttgtgcggggctttttagattgttgattagttccgttcaacgtttaaatcattcatcttaagcattgtatcaacggccttttccattgtttcgattgaaacaaattcgtagcgaccgtgcatgttttcagcaccagcaaagatgttaggggttggaatacccatgaatgaaatcttagaaccatctgtcccaccacgaacaggttcgattaatggtttgatatcaacggcttccattgcatctttagcaagatcaacaacgtccatgtgatcttttaagacttctgccatgttgtagtattgatctttgattgttgcaacaacgcggccttcaccgtatttagcattcatttgatcagcaactttagcagcaaatgctttgcgttcttccaaaccatcacgttcgaaatcacgaatgatgtaagccatgtgtgcttcatcaactgtgccttcaaggcttaataagtgatagaaaccttgacgaccgtctgttttttcagggacttcatcgcttggtaaagcattttggaaatcaacagccacttgaagggcattgatcatgatgtttttagcttcactaggatgcacgtttttaccttgaatatcgactttcatggcagcagcgttgaatgtttcgtattcaagttgaccgattggaccgccatccattgtgtaagcaaagtcggttgcgaaatctttggcatcaaagtgatcagcgccagttccgatttcttcatcggggccaaaaccaatcttgatgtcgccatgtttgatttcaggatgttggactaagaagtccatggctgtcatgatttcagcaaccccagacttatcatctgaacctaataatgttgagccgtcagttgtgattaaagtttggcctttataatttttcatatttgggaattctttaggatctaatacgaatttacccgcatcatctaatttaataattgattcgccatcatagttttcgacgatttgtggattgacacctttggcattgaagtcggcagtatcaacgtgtgataaaaagcccattgttggcacttttttatcaatattacttggtaatagcgctgttacatagccattactttcgttgtatttcacatcacttaatccgatttccttcaagtcgtccatcaatttgtgtaaaaataccacttgtgtttgggttgatgggctcgttgttgcgttttcatctgaacgtgtttcagttgtgacatattctagaaaacgaggaatcaatttttcatatttagccatggtgtagcctcctagatattatttaatactaattctattctaacctacttcgcattaaaaataaatgtaaacggatcagttttttgctgtgatttaatgaatgtaaccgaccaaccacgctgtttggcccacttttcaaaaatttctgtcatcttatccttcacaatactttcgacatgatgaccaggatcaattactgacaaaccagctgccaacatatcgtgaccagtatgataatacacatcaccggtaatgtagacatccgcaccagcttgtaaagcggctgggaagaatttacccccatcgccaccgacaacggcgactgtctgaactattttgtccggttcatttgaaattaagcgcagacctgttaaatcaaatgtttcgcagacaaattgcgcataatcccggaccgtcattgattgagcgacttgaccaatgcgcccaataccaatcggttgttgttgattagctaatggaatcacatcataaacgggttcttcataaggatgcgccgcaagcatcgcctgaacaactttggtttgcatggccactggcagaacaacttcgattttaacttcggtaaccgcttctagatcacctgattggccgatataaggatttgctgcgtccgttggttgaaaacgccctattccggtcgtgctaaaactgcaggcttgataatcgccaatatgtcccgcatcagcttgattcaatgccatccgcatctgttcagcatgtgactcagggacaaagaccaccaattttactaatgattggtagtccgtgatgttaaacggttgcacatcgtttagttgtaaagcttcagctagccaatcattcatgccgccgttagtcttatccaaattcgtatgggcggcatataccgtgatgtcatgcgttaacagatccgcatacatcttgttttgcggatcacttagatcgagattccgcgctgggcgaaacattactggatggtgggcaaaaataaaatcaacattctgttcaatcgcttcttgaacggtttctgggcggacatcaagggttactaacacccgttcaatgcttttatcgcgtcgcccgatttgaaaaccggtggggtcattgccttcttttaatgccaatggtgcgtagtcttcaatcgcagcaattaagtcactcgcgactaattttcccatgtcttcatctcctcgattaatgcaatttcatgttcaactgctttgactttatcagtaggtacgacttgtgcgttttgtaattgttgcaataaatgacgccgttttttcaacattgtcccccacttcaattggaaatcagcaggttgtgtttggcggagaacagggccaaacactcgatcactttcgcttaatggtgcaactgatggttggggttcgccaacaatcacttcgtagatatgcccgtcttcagcgacaatcgcttcatcaacgattgcatagtcatgtgcattcaaccattcacggacagtactttccatgatattgggttgtaacacgagtcgttcatggccgttcagatgatccaatccacgggttaaaatttccgtgatcaataaaccacccatgccggcaatcacgatgcaactcacatggtcttcttcaggattcaatacctcgacgccatcgcctaagcggacttgaatctgttgttgtaagtgccattgattaacgtgagtctgtgttgattcaaacggaccggcaactacttcaccggcaatggcgcccttcaaccggttttgttccgtaagccaaattggtaaatatgcatgatctgaaccgatatcagcaacaatgctatcttgtgggacaaactgcgcaaccgcagctaaacgctttgataaatgaattggtgacaaaaataaaactccattctagaaactttgattgttatagttagtataccaaattttagacggcatacgcagtcaaagtgaacacttgattctggatagcagaagttgctttaggcaaaatttagttttatactgaaattaaatcgaaaacgctttctatacattaaggagtggtctcatgagttggttgcaactattctgtgttttcatgattggtttaggcatttttcaaatttataagtcgtatcagtattatcaagacttaaaattacacgcagatcaaaatacttctgtctttgcgccagcagcgctctgttcgagtgctttcatggggcttgtctttattgggattagtcttgctagtttattgaattggttataaacgtcaattagccccttctttttgagctttattagttttcgaaaatcctagttaacataagataaattatttacagtgaagggggtggtaacatgaactggttaccaattattgggattttaatgctaatcatcggtgttttccaactttcaatgaccattaaaacattcaagactttgaaggttgaagcaaaccacagtacttcagtcttcatgcccatggcgttatggtcaggtgcattgatggggattgtatttttagtagtggggattggtgctctgcttgtttagatacacgcaaaaaaggccgcaagctaggttagcttgcggcctttttattgattgcctaaacgtgctttttagttcaacaacttccgcttaatctaacattgccattaattctaaaatctgaattaatgacaatattgtattaatgctcagttgctcccgtaactaaacgcactttatcgaaaacgtgctctagcaggcatatttctgcggctagctacgtcagtcaaacaaccaacatcgttggttattcgcctgactatgctaaccctcaaaatatagccgcctgcttacgcactcttttattctaaaaagtcttttaattgttttgaacgtgatgggtggcggagtttccgtaatgctttggcttcgatttgacgaatccgttctcgcgtaacgccgaacaccttacccacttcttctaatgtccgtgtccgaccatcatcaaggccgaaacgtaaacgtaagacgttttcttcgcggtctgttaaggtatctaggacactttctaattgttctttcaacaattcataagaagcatgttcttcaggactggttgcatcttgatcttcgataaaatcgcctaagtgtgaatcgtcctcttcaccaattggggtttcaagggaaacaggttcttgagcgatcttcaagatttcgcgcaccttatccgtattcatatccatttcagcaccaatttcttcaggcgttggttcgcggcccaaatcttgaagtaattgtcgttgaatccggattaacttgttaatcgtttcaaccatgtggacaggaatccgaatggtccgggcttgatcggcaatcgcacgcgtaatcgcttgacgaatccaccatgtggcatatgttgagaatttgaaccctttacggtgatcgaatttttcaacggccttcattaagcccatgttcccttcttgaattaaatccaagaattgcatgccacggccaacataccgtttagcgattgaaaccaccaaacgcaagttagcttcggcaaggcgttgcttggcttcttgatcaccttgttcgattctcaaggctaagtcaacttcttgttgggcgtttaaaagagatacccgcccaatttcttttaagtacatccgcacaggatcgttaatcttaatcccggttggtgcagtcatatcttttaattctttagcagaaaccttttcctttttaagggtagcggcacttggattcccatcttcatcgacaatcccaatcccttggtcttccactttttgcattaattcattgatttcatcagcttgtagcgcaaatggtttcacgatttttgcaacgagttcatcattggtgatttctttctttggtttgtattccttaattaaagccttaaccgcagtatcaaatttcttcgtgtcagcttttttattatcagccattcagaaacctcctaatatcaatttcctaatttcttttgcgaaacaagtctaatgacctccagggttaagcgcgtttcttcgctcgcattccccaatttggtcgcctcttttaaggcaattttcgcttctcttaattgttcctcaacgttattttgcgcaatgacgaacagacagtcgtttaacgcctcttgacttgcctcttctggtaagtcaagcgcatcaatctgaacgactaaggcttgtaagtcatctgggatataacccatgaagtcggccaaggtcgacttaccttcagctaaaaaggcgcgccataactcgtaaatcagttggtacggggtatgcacaaaactaaaatcggcattgttctccaattgcaggcgcatatcgtcattagccatcaacatatgcaacacttcttgctccgcgtgttcaacccgggttagccgttgtggctgacgcgtcgctgttgcccgcggatcaccaatgattggcggtggtccacccacaaatgcgtcatccggttcaggtggcatgtcataatcatactgactagatgccggtgcaagtggttgctgcgttgcccgtttaacgcgcaatgtttgtaactgccgcttcaacgtatcaagggtaatgccgctatcggcttcaatttgcttgaggtaaatctcgatttcaagcggcgaatcaattggcgcaacgacggacaatgcctgttgcacgtaatcaagttgatccttctcgttatccagatttaacccttgcttcaaataccgcagttcaaatgcaatcggtgtttcagcaccattttgcaaggttgtcttaaattgttcagcaccatattggcgaacatattcatccggatcagcgccactgggcaaaaccaccacactcaattcaagcttggtattttgctgcaacatggtaattgcgcgtttcatcgcttcgattccgggacgatcaccatcataacagacaattaattcccgagcctgttgccctaaaattcccaactgctcagtcgttaaactcgtccccattgaagcgacaccgtttgaaacaccggctgaatacgctgcaatcacatccataaacccttcaaacaggtaaactttgcgttcttggtgaatagcagtctttgctaaatcatagttgaacaaaaccttccgcttgttaaaaatcacggtttcaggactgttcaaatatttgggttgatctggttgtttcaccaaaacccggccagaaaaagcaatcacttcaccttgcgcattccgaatcggaaacatcactcggccggaaaaacgatcatgcagcttgccggtctgagtttcaataaataagccggattgacgtagtgtctggtacggaacttctttattctggaagaatgaaagcattaaatcggtttgatccggtaaatagccaatactaaacgtctcaattaattgatccgtcaagccccgttcgtgtaagtaatctaacgctggttggcccgcttcagtactcattaaaatatgcgtaaagagttcattggcctgacgatagagttgcttaaactgcgtcacttcacttgattcttgaacattttgagtgggtcgataagtctccgctaaactgaagccgacaaagtcagcgatttttgtaacagcttctggaaaactaatctgttccagttccatcaagaacttgaagacattcccaccccgtccgcaagagaaacaatgaaaaatctgtttctcttcactaacggagaatgatggggtcttctcatcgtgaaacggacaaatcccaaataggttattgccgctcttcttgagctggacatactgaccaacaacatccactatgttagtttggctccgaacatcatcaatcacgtcattcggaatctttcccgccattggtctcacctcactattcaattcaaattgtactaagactgtaaaagccgcacctcacaatgaaatgcgacttttaaggattatcagcacaaaaatacactatatatcatagcaccatttaggtacagttgcaaataaatatagcaaactatctcattcgttgtcaaggtcctttttcaaaagtcccattaagatgacaacgtgattatattgcaggtcctttgccgcatagactaacgtgacgttgcccagctcaaggtgctcgtgcactaccttttcaaacgccggccaagctggattagctgcaatttcagcaaggtacttttctttaaaaacgggaaacttagctggctcatgaccaaaccacttgcgtaagtcagtcgttggggtaatttctttcgcccaggtctcaatagcggcacgttcttttgaaatgccgcggggccaaatccgatcgactagaattcggtacccatctgagtctgtcgctgcttcataaacccgtttcatttgtaacatgctattatccccttttgaattgtttatttaacaatcaattcgtttaaatcacctaaggtaagggcgatttgagcgataatcatcaactgtgttaagcgatttcgacgaacagcttcatcttcagccatgaccattgtggcatcaaagtaagcttcgattaatggtcgtagtgtttgtaagatgccgtaattatcagctaatgggttcgtagcaattgtaccacgtaagtcttcgaccgctgtgtaaagtgctttttcagctttattttcgaataatgcaggatcaaccgttaaatcagttgttgcaaagtcaactttttcagcgagtcgtaacacacgtgtcacggcttcaaccgttgccttgaaatctgcatcatcttgatggtctgaaagcactttggcagcttcgaacatcacgactggatcttgactttgattcttcaagacggcatctacgatatcacgccggactttaggccgcatgccgttaaagcgttggcgaacacgatccgttaagaaatcgctgatcgcgtcagcattggttgaccaatcaaggttgaaatcagcttgttgcttaacaatgtcactcatcgcagcttgataatcggccattgggaagtgccagttttggttttctaagatgcggataatcccataagcttgacgacgcaatgcataaggatcgtttgaaccacttggaatcatgcccactgcaaagaaatcagccatactatcgaacttatcagcgattgctaaaaccgcgccgacctttgttgcagggagtgcaccttcagcactaattggcatgtagtgttcgcgaatcgctgtggcagcggctggtgtttcaccttgtaataaggcatatttttcacccatgaccccttgcaattcggcaaattcaccgaccatgccagtcactaagtcaaatttataaatatcacttgcccgttgcaaatcaactaattctgcttctgataaaccaaatttttggcctaagaattgcgcgattaaaccaacacgggtcatcttttcagccagactaccaatcttgtcgtggaatgacacgttttgtaacttcgcaacgttttgttcaatcgttaccttttgatcttcatggtagaagaaatcggcatcttccaaacgcgctgtgaggactttttcgttcccagcaatgacattttccatgaagtcggtgttcccgttgcgaacaccgatgaaaacaggtaataaatcacccgcttggctgcgtgcgtagaagtaacgttggttatccttcattgaggtaatcaacacttcttctggaatttcaagatacttaggatcgaattgcccataaaaagcagttggccattcaactaagttcgtcacttcttctaacaagtttgcgtctaaatcgacttgccaatcgttttcttgggccattgtttcaatctgagtttgaattaagttttggcgtttagcttcatccgcaattacgaattgtgcttccagcgttgcttcgtaatcagttgctttcgccaatgttactgcttgacctaagaaacggtgcccttgtgttgtgcgatcagttgtaacgtttaaaatactgaagtccataatttcatcgtctaataaagcaacaatccagtgaattggacggatatattcaaaatcgtagtctgcccagtgcatccgtgttgggaaagacatcgccataatcacggcttttagttctggcaagattgtttcaacaggtttgccgatgattgatttttcaacatagacgtattcaacaccttttagtgctttaaaagtaatgtcgtcggttgttaaaccttggccgcgaacaaaaccttgcgctgctttactccagttaccttcagcatcaagcgcaattttcttagcggggcctttcgcttcttcgtgaatatcagcttgcttgtccgctaagtcttcaatcaagacggctaaccggcgtggtgttgcataagttttgatggtcccgaatgttaagtgttgttcttctaaaaagtcgcgtacgcgcttttctagttgttggatgctgggcatcacaacgtgggctggcatttcttccaagccaatttctaataagaatggtttagtcattgttaacgacctccgtgtttgattcttgagcatgttttaagagcgggaagccacgtttctcacgttcagcaacgaatgcttgcgcgattgagtgcgccatccggcgaatccgtgacaagtaaccggcccgttctgtaacggaaacggcaccatgggcatccaataggttgaatgtgtggctacatttcaagacatagtcatatgctggatgaacaaggcctaagtcaattaaacgttttgcttctgtttcgtattcatcgaagaatttcaaaagcatgtcttggttactgtcttcaaaagcatattttgaatgttcatattcaggttctttaaaaatatcgccatataacacgccattgccccattcaagttcgaacacattgtcgacatcttggatgtatgaagcaagtcgttcaaccccatatgtgatttcacttgtcacgggatcacattgcaaaccaccgacttgttggaagtacgtgaattgcgtcacttccatcccgtctaaccaaacttcccaaccaacaccggcacaacccattgatgggttttcccagttatcttcgacgaagcggatgtcatgttccaaaggatcgatgcctagagcccgtaaactatccaagtaaaattcttggatgtttaatggggctggtttcatgaccacttggaattggtgatgttggaataaacggttggggttttcgccataccgaccatctgctgggcgccgtgaaggttctacgtaagcggcgttccaaggttctggtccaattgcccgtaagaacgtgtatgggctcattgtgccggcccctttttctgtatcgtaagattgcattagcatacagcctttttcagaccaaaaacgctgtaaggttaaaatcatttcttgcacatttaactttttaaccatttcaattcctcttttccgtattttgcgcataaaaaaagcctatgcgactgttaagtcacatagggacgatttctcgcggttccaccctacttcagctcaaagcgagctgctgcttcattggtatgactccgaaacgccaatccactcaagtcttgttctagttctcactcacctagaatcactgtctgaccatcttaagggacccttttcttcaacgtctattaagttgattactattttagtcgtcttttggcgtgctgtcaatttctgacggcactttttttaattgtggtaattgactatcgaaactgtacatcttatcgatgaattgcttactcttgagcgacaagccaaccgtgtcttggtaaatccggtcgatcatcgtcttaagctccatctgggtcgtttgtttgacattgaccgattggatcttgaataaatcaatcactgaaaacaaccgcagataatagatcgcccgttgactaccgtggaatcgattaacatccaagtgccagtggcgttgacaaagcagcccgccataactctcagaataatcaaacggcaaatcagaacgcccacaaaccgcacagacttgcagttgtggctgcaccccgaagacttgtaacatctgaatctcgatgatgtgcgtaatcattgccgcgtcaaaaccttcatcgattaatgagagtgcctgttcaatcttcggataccaactgccgagcggttcgctatccggaaaaccaacatcgactaagcctaagatataggtcgcataggcatttaaaaacaagtcattgctaatcgattgaaactgactcgccgacttgacattatttaaaaaggataagccatcatcgcgaatgtcgccaccgtactcagcttgggtaaacggcaaaatagccgcactcaagcgaaacttcggtttattcgcaccgcgtaagtaaaacatctttttgccaaagcgatcggtcaaaatcttgaccagcatatctttttctttatagttcttccgatacatcactagaccattaaagtcttcgaatcgatgttccgccattgcttaagcctacaatctctttttattgtaaccaaattcacggaggtattggttattgtcacgccaattcttttgaatcttaacccagagcttcaagttgactttttcgccaagtaaagcttcaatttcgcgacgtgacctaatcccgatttctttgataatggagcccttttgaccgatgataatccgtttttgaccatcacgttcaacaatgatattcgcttcaatctggagcttatcattgacgcggtctttcatccgttccacaaccacggcaacagaatggggcacttcttcatgcgttaattcaagaattttttcccgaattaattcaccaacaacgaaatattctgggtgatccgttaattgatcttctggatagtattgggggccttctgggagtgtttgttccaattcttttaacatttcagggacattgttaccttctaatgcagagattgggtaaacccctttgaagtccaattcatgccgatattgttcaatcattggtaataaatcgtctgggtggatcgcgtcaattttgttaacaaccaaataaacgggtttcttgacgttctttaattggtccatgatgtattgatccccaggcccttttttatcaatcccactaatcatgaataaaatcgcatcgacttcgttaaacgtcgaaagcgctgcttgatccatgtattcgtctaattcgttatgtggtttatgaatccctggtgtatcaacgaagacgatttgtgcattgtcatccgtgtagatcccttgaattttgttccgagtcgtttgtgcttttgatgacatgatggcgattttctcaccgatcattcgattcataaaagttgatttaccaacatttggtcggccaacaatggccacaaagcctgagcgatatgtttctgacataatagtccccttttagttaaatatggcgtgtccaaagacaatggcgccaatcaatagcgctaaaattgcgctgattaagacactcgcagcactgatatctttaatctttttagcgagtggatggtactgatggtcaaccaataaatcaaccaagtgttccattaccgtattccaaaactcagcaatgaatacaatgaagatggcagaaataatcgctaaccaatctaaataatgtaactgacaataaacaccgaaagcaatcgcaatgagtgcaaaccaggcatcacgccgtaaattagcctcagttttaaaggcggtccataatccaccgagtgcgtggcgtagtgactgccaaaaatgtttattcttgcccgtttgtggttttttaccgttgtaatccaaattcatcgaggatcttctcctgtaatggaatcatttgtgcttcatcttcactatgaatgtgatcataaccatttaagtgtaagaagccgtgaaccattgtgtaccctaattcacgttcaaatgaatgtccataagtttcagcttgttcagctgctttttctaatgaaacaaacaaatcaccgatattcttgggaatgtcgaatagttcttcaaagttggctggtaatccttcttcttcaggatcttcttcgattgcaaaactgatgacatcagtcgcacggtcagtatcgcggtattccttgttaatttggcgaatgcgttcgttcgtcacaaacgtgacagacatttctgtgtcttcaggtaaatctaattgttgcccggcatattctaaaatatccgtgaccagttttacgtttgcttctgcaactacttttgtttcatcgataatttggatatccattcaagtgttcctactttctcatcttttcaatcgccgcataggcgttaataatcttagcaacaactgggtgccgtaccacatcttctgaactgaactgtacgaaagcaatcttaggaatatcgtgcaaaatatgttcagcttgcaccaagccgctcattgttttcttaggtaagtcaatctggctaatatcgccgttgacaatcatcttcgagttaaacccaagtcgcgttaagaacatcttcatctgagcaggcgttgtattctgggcttcgtccaaaataacgaaagcttcttctagtgttcggccacgcatatacgcaagcggtgcaatctcaatgacaccacgctctaacaaacgttcagtatgttctttacccaaaacggcatacaatgcatcataaatcggtcgtaaataagggtccaccttttcctttagatcacctggtaaaaaacctaaactctcaccagcttcaaccgcaggacgcgttaaaatgatccgttcgactaatccttgtttcaacgccgcaacggccatgacaacggctaagaatgttttccccgttccggcggggccaatcccaaacgtgacatcgttttgacgaatcgcattcacgtattgacgttgaccgaatgtcttcacgcgaatatgctgccctttacgatccttgattaatggctccgtgtaaagttcttggaaaccagcaatcgtgcctttttgggccatcttcgtcgcactcaccacatcactactattgagcttaatgccatgttgtaacagcgccactaagttttctaaaacagaagcggcttggtcaactgctggttgttcgccgcgaatggtaatatgctcgtcaaacgcaatcagttcgacagataagctttcctcgatgatttttaaaaaagtatcgtgtgtgcccattaaagcggccgctaaatttggcgttgccaattgaaataaacgctcatctgtttcagccaacaaagataactccttccagagtgtgactgcaactgattctgagtattatctagcccagcaaataaacgactttagtcgattattaactacacgtcgtaaagtgaagaatcaagttgcaaccgcacgtttcaacttcatttgttttagaatgaaaactaccatcattctatcacaaacaacaaccgttttaaaagtagccagccgcgctaattcacgaatttatggtcaattatcaaaatctgaattaacgaccataaaaaaaagcgggactccccagaggaagtcccgcctaaaattaacttaattttgatttaacgacttgattgaccatagcgccatcagctcgtcctttgaccttaggcatgacatattgcatcaccttgccaaagtcagccttacttgtcgcaccagtagcctgcattgcttcgtcaacaatggtgaccactgctgcttcatctagctgctctggtaaataagcttgtacgatttcaatttctgcttttgtttgttcagcgagatctgcacgatcgcccttttcaaactcagctaatgaatccttacgttgcttaagttgtgatgatagtacacttaattcttcgtcagaagataagtcttgccccgcactaattttggcgttagttaaagcggtctttaaactccgaataacagctaatcgcaacttatctttggccttcatcgccgttttcaaatcagaacttagttgttcaagtaaactcattcaatcatttcctttatctaagaaattagaacttcttacgttttcttgcagcttctgatttcaacttacgttttacacttggtttctcgtaaaattcacgtttacgatattcttgtattgtaccagcttttgatacggaacgcttgaagcgacgaagagcatcatctagagattcgttactgcgaacgactgtcttgcccatatgatatccctcccctcgcgtgctaagtataaccgtttacgttcgttaaaaatttaacttcacgtgaaccgttctttgctattatagcgaatgttgaaaatacggtcaataacccacagggaattaattgaatattttttcaaatctagcgattttttcgataattatggtatgatagcgctataaaagtgaataaaggagcatgccttatgccagaatctaaaccattaaccgtttttgtgctttcggactcagtcggccaaaccgccctccaattagcacaagcagcgctcgcccaatttccggacgttaaacctgatctcgtccgcttccccttcgttcacacgcaagagaaactcatggacgtcttaagcaaagcggttcctgaagaaacaattgtggtccatacattagccactaacggtctttctgaaatcgccgaaacctattgccaagcgaaaaaaattgccagtttcgacatgatgtcaccaatgacacaaatgattactgctaaaaccaacagcacgccaactggtgaagctggggcactacatcatttgaacgatcgttattttgatcgcatttcagcgatggaatttgctgttatgtacgatgatggtaaagacccccacggtttcttagaagcagatatcgtgttgctcggtgtttctagaacgtctaagacgccgctgtcgctctttttagccaatcggaatatcaaggttgccaacttaccaatcgtgccacaagcgcacattccagacgaaatctggcgggttgatcctaagaaaattatcggcctgatgaatacaccagaagtcctcaataacattcgccgggaacggatgattgcttatgggttaaatcctgataccacttattcagacatggacgaaattaaagctgaattggctttcgcccaagacctgtatgataagattggttgccaagtgattaatgttgccaaccgttcgatcgaagaaactgccacaattattcttgaacgcatgggcctcgattttgcgggcagtgcgaacgatcacgtcaattaaaaaaagcgttcaaatctgaaatcgatttgaacgcttttttaatttgttaagcttaaagtttcgtccaatatttggggttcacttcactcaacctctttttctatgcattatgatgatcacttgtttgtgtgatttgattaattttcgcgtgtaattcatggacttcagcttccttatccgctaacgctttatcaaatgttctttgattctttattttttctgcttcaaccgctgctttaatttgagcagcttgattgtcgcgtaattcagtgacttctttggtcatttccttttgtgctttccgttggctcaacgtgctgccagtcgctgccaagaaggtaatgatggcgccaatcaataatgacaccaaaataacgatgattaatggccatttaacatgggtgaatccaaagttaatggcgactggttcaacgtttaaaacagcaaaaattacgacaattaatgctaggaccaatactgtaattaatcgaccttgttttttcataaaactgccccccctacttcttattcaataagttaccggcaacatagtctccgatatgtggtgccagttgatagaattgtgcaccgatcgccatcaaccatggtgcattaatttcacgttttgcatgcccgattgttttcacaatccgataagctagttgatcaggatctaaaacaacccaatcgaccgatttcaaataattaccggtcttatccgcaatatcaaagaaagctgtatcaatcggcccaggattaacggtagtcacttgaaccccaaatggttttaattctaagcgtagaccatttgaatagccaacaaccgcgaacttagttgccgaatagatggccgacttaggcgttgccatcttgcccgccattgaagcaatgttaatgatgtggccgctaccttgttcaatcatcatccgcccaaaagcgcgcgtcatgtacattaaacctagcacattaacccggaacatctgctccacaacggtcatggatgtgtcgaatgcattttcaaaacttccaaaaccagcagcattgactaacacatctggaatcccgacttcagtttgcacctgagccacaatggtttcaatcgctgctggatcactgacatcgaggacatatgcatacgccggctgtcctgaaagccggtgtgcttcttcgcgaaccgccgccaattcagcttctcgacgggccaaaacgacgataattgcccctttactagcggcttcataggcaatcgctcgtcctaaaccagacgatccgccggtaatcaccacaattttacggtttaaatctctcaatgctgctaatttagtcatctgtttactcctttcgaccatgaaacggaatgtcatagatatctaagtcactaactacttttgtgtttttaaaaatatcgcgggcatcattttgtaaatcacgcactgcttgcccgaggtaccgggcagaaatatgggtcaataataaccgcttcacatgcgcggcttttgcgacctttgctgcattaatgttagttgaatggaaatattgacgcgcaatcttttgttcttgcttaccaaaggtcccttcatgcactaatacatctgcattagccgctaagcgttcaattggtggacattggcgggtatccccaataatggtcacaatccgtcctttttgagcatgtccaatgtaatctttgccatcaatttggcgcccatcagcgagtgtaaccacttctccctttttaatctttgcgtatacaggaccagccggaacaccatctgcatgcagtttctcaacttgcagttcccccggatggtccttttcaataatccgaaaaccataactggcaatccgatgatccaatttagcacattcaacccggaaagtcgcatcatcaatcaaaacaccttcttcaggaagaatgacaaagttcaatggatacgttaaatgactttcagagatttttaaactcgtgcgcacgtattcttcagttcccttagggccgtaaatcgtaagtggttcgtcgccaccttggaaagatcggcttgataaaaagcctggtaacccgaataaatgatccccatgtaaatgtgtgagaaagatctttttaactttgcgcggttttaatgtcgtttttaagatttgatgttgcgttgcttcaccgacgtcaaacaaccacacttcatttcgttcatccaataatttcaatgcgacacttgtgacgtttcgttgtcgtgctggaactccagcgcctgttcctaaaaattctaattccatttagctcttccaatctgtctttaattcaacgctttattttgccgcgagggctttggtaataatggcggcatattcattgaccccagttgggttcggatgcaccttatcttggtagaaccagtcactgtgtttggcagcctgtgaataccaatcaatcaccgttaagtttggatactgtttagttgcatttttaagcgcctggttaacatcattttgccaaggacgcgttgggacaaacgcgttgagccaatagacttttcgcttagtcccaatggctgccataaattgcgccatctgttcttgcgtaaaggcgccatttgttcctagactgaccagtacagtatcgctaagggcttgtttttgatcataatcttttacaatttgaatactttgatagagttggcgcccaacagccgcatcaaccaacatattcgggaataacttctgtaaagcttgactaccgtcgagtaggacggaatcaccaattgcagtcaccgagatattctgggcccgttgaatcgtcacttgactcaagccatatttttcaaattcttggttgattggatgcttttgcgcagccgcctcagccgctttttcagcttttgaagttggaccatttgcttgtccagctttattctgggcttttgcttttttaatcaacgcatccttacgcttttggttagctttttgattttgcttaatattgaccgctaatgccgatttatgcgtatctggcgccggttggaatggcgcttgaaacgccccgactaacccgattaaaaagacaattgcgagtccagtcactcgaccaaccacccgattccaatgtggttggtgcataaattgcttcaattggtgccataactgcttgtacggatagtgtgctagtggctgttcaataaaccggtaggataattcggtcaatccgaaaataatcgccacttcaatcactggatataaaaccgggtgatcagcgatatttttgaagattatttcaaagaaaatcatcaccggaaattgatacagataaatcccgtaactccgtttacctaaccagttaaagaccggattcgtcaataaccgattccaatcagcgcctggatgagcgacaactgccactaaaacacagactaaagcactaaacagaaatagtcccccgcgatagacaagactactctcggcattcaacttaaccattaaccaaaccaaactgaggacactcactaacccgatgccatcgaggacgaggcgttgtttaggcacaatcttttgcttaagggctgttgatggccaaacaaacgccagcgctgctcctagtaaaattgaaaagacccgcgtatccgttccataatacaaacgactagggtcagcattgggttggtacaaaatggccatccagattgctgaaacaacactgactgctagtaatacttgggcaatccgatttttattcttaagaccaataatcaaggccacaacgataaaaggccaaattagatagaactgcccttcaatcgatagtgtccacagatgggtaaacggcgactcattattggcaaaccgatcgaaatacgactgaccatgtccaatttgccaccagttataaacgtataaaatgttcgtgataataatctgattaagttgctgtaacatttcccgctgaaaaagcgtgatgtacgcgcccgttgcaaacagcatcgttatcagcccagggtacaatcgttttacccggcgtaagtaaaaactttttaaattaatccattgattttgttcccactcttgaaccaacaaatcggtgattagataccccgaaaccaccatgaagattgggacccctaaataaccaccggtaaaagtatatggcatcagatggtataaaataacaccaatcacgccgattgcgcgtaaaccatcaaagccagtaatgtaacgactattctttaaacgcttcttgcccgccattttttcaacctactctacattctaataactgctattataacaatattttagtgatgtgcctacattaagccctgttattttatgcatcccatagaaaaaggaagcattcaaaaatgaatgtcttcctttcttgacgtgcctattattcgacaaattcaaacgtaaagttatcaattgccactaaatcaccatcatgtgcgccactttcgcgtaaggcttcgtcaatccccattgaacgtaattgacgggcaaaacgcatgacaccatcttgatgatccaagttactcatcttgaagagtttttcaaccttgtcaccagacacaataaacgtgccgtattcatcttgttcaatgatgaaagcaggtgcttccggttgatattgataaagtttttgcgtttgaacttcttcgacgtctcccattgggaattcagtcgtttcagctaataagtcagctgtcttgttcatcaatgattgcaccccttgatgcgtgatacttgaaatttcaaaaatctcatgtgtatcgccggcagctgctaatttttgtttaaactcggctaataattcagaagaacctggtaaatccatcttagtcgctacaatcacttgtggtcgttctaagatttttggatcataggtctctaattcgtgattaatttgttggtaatcttcaaatgggtcgcgacccgtttgatcgtccatttcgattaaatgcaagacaacccgtgttcgttcaacgtgccgtaagaattgaatccctaaaccaacaccgtctgaagccccttcgattaaccccggtaaatcggctaagacaaagtcccgaccgtcatcgagttgcaccatccctaagttagggaccaacgttgtaaattggtaactagcaatcttaggtttcgcacttgtcaccactgacaacaacgttgatttcccaacagatgggaaaccaaccaacccaacatcagcaagcacttttaattcaagttgaatgctgcgttcttcaccaggttcaccgttttcggcaacttccggcgcactattacgggcatttgcgaaatgcatattcccacgaccaccacgaccgcccttagcaatcactaattgttggccatcttcggttaaatcaccgagtaattcattggtttcagcatcgcgcaccgttgtaccaggtggcacttgaacaaatgtatcctcggcaccgcggccgtacatttgtttattctgaccattaccaccactattggctttaaagtgatgacggtaacgaaagtccattaatgttcgtagaccttcatctaccactaaaatgacacttccgccccgaccaccatcgccaccggctggtccgccaagtggcacaaacttttcacggcgaaatgcaactgcaccatcgccgcctttaccagctttcacatcaattttgacttgatctacaaacatattttgactccttctcatcgttaaacagtaccttatatactaccgaaaaaaagattaaaagtaaacagataactggttaaacactgaattggctctatcatcgataaaaagcgcactgagtgagtgacctcaatcagtacgctttttattcgttaattaatggctagctggcaccaatttaaattggctccatggtttcaaatagtctaataggaataattctgtaggcgtaatacggccaaccacattcacgcgcccgtcatttggcatggctttgagggcaatttgggtttcccctttatactgaccgtaaccgacgttatcgattaaaatatcaccgtgttggatgtcaactgtatggtgggctgggaaaagcaggtctttaaaaatgacccgtgtcatcgttgaccgtagaagatattctgaacgatcgccacgataactatgcagactttcaaagaggaccttgcgttcatcagccgtaatgtcatctgcgacgtcgattgcgattgctgggaattcagcgttaaagacgtcatgcatcgtcttcaattctgcttccgaagcatacgcattaccgacaataatgtcatcaatgttatccattaaaacgtaatgtttcatctgcgttgccatcgttaaatcgcgatcaacttccatcgtgggcaacccatcttgtgttggccatggtccgaaagtcgcttcatgtgaattgacaaacgctgctgtattcaaattgtattttgcaaattgcgccgtacattgtttgaagaagtcttcacctaatcccgagaaccgatgtggatagaagttatgacaacctaacaagttttctcgtttgggtgaataactcataatgttatcaacgtaacttgtcccttgactcatattaatttcaatttttaaattaaacggattgcgcgtcatttccgcttcttcttggccggtaaaaccgttgtccaaccgaattccccaagcaccaagttcatggaaaaaacttaaattatcatatgaaataccgagttgcttgaacaaacccggattgatatcaatcatgacttgcattcctaattggttggcatgggctacaacccgtttaaagttgcctaacacggcttcttgatcgccagacacctccaataatgatgtaaagacgcgttggaacccatattgatgcgctaaatctaagtaagccgcatccttttcaaaagttgatcgttctggataaattgaaacgcctagttttcccatgaatagaacctcctaataattgggctataccaccctgtcatctattagtctagcataccttaagcacttttgaaaactcttacattacttttaaactggtctatttctggcattgtccgcagtttgctcactaacgcaccaatctttttttcggtctatatcagcgttttgatggtttttgaacgtttttgaaatatttcgattgcttttgaatggaaacgatgtcataatgatgctacggaggttttgtcatgttaacagaagaacgtcaccaagcgatattacaacttttaaagcaacaagacgtcgttaagatgcaatctttgtgccagctattgaacacttctgaatcaactgtccgtcgtgacttgcaattgctcgaagaacaagggcttgctactcgaattcacggtggtgctaagcgcatcaacacgttacaagaagaacttggccagattgaaaaaaacggcaagaacgttcatgaaaaaaacgcgattgctaagtttgccgcagcacaaatccaacaaggctgcgtcatttacttagatgccggcacaacgacccaggcaatcatcccctacttaagacctgaaatgaatttgacggtcgtcaccaatggggttgataccgcttctctcttagccgatcaccaaattcaaacctttctattaggtgggcgtgttaagagcaaaaccaaagcgatggtcggtgcggctgctttagaaacccttttgcaattccaattcaatcaggcgattcttggcacaaacggtatcgatgttgaagctgggctaaccacccctgatccagaagaagccactctaaagcgctttgcgattcaacaagcgaaccaaacgatggttttggcggatcacacaaaattcgacgctgtttcgttcagtaagtttgccccattggcacaagtccaattgattactgatcaattgtcaccatctgtttacaaacactatcattcacacacagaaatccaggaggttttatcttgatttatacgattacggcgaatccatcaatcgattacgtcattcaacttgaaaaactaaataccggcaacgtgaaccgcgtccaatctgacgttaagctccccggtggtaaagggattaacgtttcacgcatccttgccgaattagcattaccaagcgttgccctcggctttgtcggtggcttcactggtcaattcattcaaagcaaactcaacaacgcttcgatcgactgtcgattcactgaagtcgaagaagacacccggattaacgtgaagttaaaagacaatactgaagaaactgaaattaacggtcaaggcccacacatttcagcagaagccgttgccaacttgaaacaacaactggctaagctagaagccggcgatattgtcttcatgtctgggagtttgccacctaatttaccggctagtttctacaaagacttaatcccattgattcaagcgcacaacgctgaatttgtaattgatacaaccggtcaagctttgttagacacattggctgaaaaaccattggtcatcaaacccaaccatcacgaattggccgaactgttcgacacacactttgccaaccaaagtgaaatcatcgccgctggtcgcaaattattagaccaaggtgcccaacatgtcttggtctcaatggccggtgacggtgcccttttaatcacaccagaccacgcttacctcggtggtacacctaaagggacagtgattaattccgttggggctggtgattcaatgatcgccggttttgtcggcacattcgcacaacatcacgatgcactcgccgcttttaaaacaagtcttgcttgtggtagtgccaccgccttttctgaagatttagccactagcgctaagattaacgaactcttacctcaaattgaaatcacacaagttgattaattttaaatacaaaggagatttattatgaacatccaagatttactcttaaaagatgcgatgatcatggatttacaagcaacgactaaagaagccgctgttgatgaaatggttgcccgctataaagacatcggtgttatcacagatgacgccctctatcgtaaagatattttggctcgtgaagcccaatcatcaactggaattggcgaagggattgcaatgccccatgcaaaagacagtgccgttcaacgcgcaactgtgctattcgctaaaagtcaaaacggtgttgaatatgacgcactagacggccaacccgtttacttgttcttcatgattgccgctccagaaggcgctaacgatacgcatttacaagccttggctggtctttcatcccttttaatcaacccacaattagtcgctgatttgaaacaagcccaaacaccagaagacgtgcaaacgctctttgctaaggctcaagctgctaaagacgcagaagatgcgaaggaagaagctgaagaagccgctaaagcacaagccgcagccgcaacgccagctgatgatcaaaaaccattcatcgttgctgtcacagcctgcccaactgggattgcccacacttacatggccgaagctgccttgaaagaaacagctgctaaaatgggcatcgacattaaagttgaaacaaacggttctgaaggcgttaaacatcaattaaccgctgacgatattaaccgcgcaacaggggttatcatcgctgccgacaagaaagtcgatatgcctcgttttgatggtaaacatctcttgaaccgtcccgtgatcgacggcatcaagaaaccagctgaattgattcaaaaaacattggatgaagaaggctcaatctatcacgcaactgaaagccaatcaagcgaagaagcttcagctgacaagaaaaccctttggagtcgcatctaccaagatttaatgaatggtgtttcaaacatgttaccattcgttgtcggtggtgggatcttgatggccatctcattccttttggaacaaaccgttggcgcacattcaaccacttttattttcttgaactcattaggcaataatgcctttaacttcttaattccggtccttgctgcttacatcgcgatttcaatcggtgatcggcctgccttaatgcccggatttgtcgggggctacatggctagccaagcaacagccagtgtccttgcttcaaagagtccagccggattccttggcggtttagctgctgggttcatcgctggttgggtgatcgttggtttgaagaaagtcttcaagaacttgccacaaacccttgatggtttaaaaccaatcttaatattccctgtattaggactatcgattgttggctttattatgtacttcatgatcaacccagtctttgctcaaattaacctctggttgagtaccttcttaacacacttaggggctggtaacgcattactacttggtgcgattttaggtggcatgatgtccgttgatatgggcggtcctttcaacaaggctgcttataccttcgcaatcggtgtcttcacaaccaccaaagatggttcattgatggccgctgtcatggctggtgggatggtcccaccattggcaatcgcggttgctgctactattttcaaaaacaaatttaccggtagtgaacggaaacaagccttcgcaaactatgtattagggatttcattcattactgaaggtgccattccatttgctgcatcagatccattacacgtgattgtttcaagtattatcggttcagcaatcggtggtggtttaacccaattatggcaaatcactgtccctgcaccacatggtgggatcttcgtggcaccacttgccaaccacggcctactctttgtgcttgccgtgttaatcggaacatttgtcagtgccctaatcttaggcctctggcgtccagtggcaaaagaagcttaatttaaaaagtcgtagtcaaatgactgcgactttttatttatcttgaaaatcagtattgtgcttttgtttccattcattaatgtaattcaaacgttgtttcatccgcgtttcattgccttgttcggtcggccggtaataaatatggtcggcgatactctctggtctagttggcatcgtggtcaatctatcatcgtagaaatgtgcgagttgatatcctttgccgtaaccgacttccttcatcaatttcgtcgccgcattacgcaagtgcaatggcacgggttcatcaatcgtctttttaatatccttttgcaccgctgtccgcgccttataagtggcgtttgatttcggcgcaagcgatagataaatcacgcactgtgttaaatgcacgtcgcattccggtaagccaatcgcctgacaagcttgaaagacgttcattgctaaattcaatgcattgttatcggccagaccaatgtcctcactcgcaaaacgaacgagccgccgagcaatataaatcgggtcttcgccgccgtcaatcatccgccccaaccaataaatcgctgagtcgacatcactattgcgcatcgacttatgcaaagccgaaataatattatagtgttcctcaccgtctttatcataataggcggtttttttatttagcagttcccccaatagatcgccatcgacggtcacttgatggtcttgcacatcactattaataactaacatttctaaaatattcagcgccgtccgtgcatccccattcgaaaagatggcgacttgcttcaataattcatcactgatatgaaccgttaaatccgggaaagcttggggcgcctttaaaacccgttgtagcaactcaataatgtccgcttccgtcaattgctttagcacaaaaacgcgtgaacgcgacagcaatgctgaattgatttcaaacgacggattttcggttgtcgcaccaattaggataatgctgcctttttcaacatacggtaaaaaagcatcctgttgcgccttgttaaaccggtgaatttcatcaataaagacaatcgtccgctcacccagttggcggttttcttcggcttcattcataatcttccgaatctctttgatcccattcatcgcggcactaaacgtgataaatttcgaagccgtcttgcgcgcgataatctccgccaacgtggtcttcccaacgccgggtggtccccagaaaatcatcgaagtcacttgatctttatcaatcatttcgcgtaaaaacttgcctggtccgactaaatgcttctgaccgacaaaactgtctaaatcagacggtcggacccgattagcaagcggcgcattcatcgccatctcttgatcaaacaaagaggtttgtcccattttttcaccctactttagttgttgttaattgaaacttcttaaaatgtgcccgtaaatgacttaaggttaaactctccgcgtctgaggcaacaagctcaaatggtgcacccatcgccatcacttggcctccttgactaccacctttaggccccaagtcgatcaggtaatcggcattggtcatcaaatcaaggtcgtgggtaatcatcataatggtggcacccttggattttagctggttgatgacgcctactaaggtttcaacatcgcgcggatgcaagccaacagaaggttcatcgaagacgaataaagtgcccgcccgttttttattcaaatgcgttgcgagttttaagcgctgtgcttcgccacccgaaagactcggtgtactttcaccaaggtgtaaataagctaagccaatttctttgagaatcttaagttccttttgaattgctggcacatctgcaaagaccgggattgcttcttccaccgataaagccaatagatcaacgatgctatagccttgccacttgatggcttcaatctctggtttgtagcggttaccatgacattctggacaggtttcttccatgtctggcaaatattgaatatccaaaataatgctgcctaacccaccacagttcggacaggcgccttctttattgttatacgaaaagtgcgcgatcccataatgatgcgcttgtgattctgataaaccagcaaataatttccgcagattgttcatgatactcgtatcagtcgcgagtgttgagcgtgtattcttaccaaccggcttggcatcaatgctgacgactgacgttaaatcggtcgtcaactgggtgacctgctcgggtaattgctcatgttggtggtgcgcttcaattgctggcactaaactatctagaatcaaactcgtcttcccggcgccggaaaacccagaaaccgccgtaatttggttatctggcactttgattgtgacatcatgcagattaaaatattggccaaccgtcatcgttgtctgctcaccagtcgttgcggcagtgactttaggatataagatgttcgctcgaccagcgatatagtggccaatcagggactgtggattctggatcaaatccgcgggtttcccttgggcaatcacttgttccctttgcgcccagcttctggcccaatttcaatcacccaatccgcttgactgatgatattcacttcatgatcaactaccactaacgaattgccttgtgccactagctgccggaaaatatgaattagcccttcgacgttgtcaggatgcagcccaaccaatggttcatctaaaacgtacaacacaccagttgtcgctgttcgcaacgtccgcgccaattgaatccgttggagctcgccagtcgacaatgtattcccattgcgcgacaacgttaaataatccaaccctaattctagtaacggttgcagtgtttctaataggttcttaaataaaattgtcgccatttgctacatttcatccggtaagtcggccttagtagcacgcacccaatcttctaatgcgcctaacgtcaaattagaaactgctgcaatgttttgtccgccaactgtttgggtcagtaatgccggatttaaccgggtcccatgacacgttggacaggttgaaaaatggaaaaatgaattgactttagccattgcccgatcacttttaaccgattttagcgattcataaacagcgtcataagcattttcatagagggtattctccgtactaaacacacggcccgttgaggtatggaaatcaaccgcatacttcgcccgtttaccatgcaggacaatttctttttccttggccgtcaagtccttgtaagggacatcaattcggaccccaatgtgggcagcaacggttggcatgaaatttcggcccggcaatcgccatgaggcaatcgctccgtcttcaatactgagattttcatccgcgatgattttgcgatcatctaacgtttgaatctgccccgtcccatgacattctgggcaggcgccagctgaattaaaggcaaagtcttcggccgatttagccataaactgcacttggcaagtagggcacgtaataatccccattttatcgccagctaagtccatcgcttgggcaatttttagacttggttgaatcacgtgcccatttggacaacgtgtcgtccctaaccgtgaaaaaatcaatctgacgacattaaaaatctcactcatcgaaccaacagttgaccgttctgatggcacacttggtcgttgcccaagtgcaatcgctgatggaatatgccgcacttcttggacttgtgagcgtttattctgcgtaattcggcgccgcgtgtacgtcgacaacgcctctaaataacgccgtgagccttctgcatataaaatccccatcgcaagcgaactttttcctgaaccagacggtcccgaaatcgccacaaattggttcaacggaatatcgacgttaatatttttcaagttattgacgttcccgccacgcacttcaatctacgttggttgttcaattgtcattattggttcgctccccgtttgcttgacggttaaaaacggccgcctctgcttctaaattcgctaaaattcgttctaaatagccgtcaacagctgccacttcagcatccgaaaagcccttgtaaaaaacggcgctcaatcgttgactaacgtcatcaccgacctgttgctgattagcgccttgttcagttaagtcaaagacccgcttgcgcttatcaagtggcgattgctcactcatcaataatccctgttcttctaagcgccgtaacatcaacgataaactactattggctaagccagtcacttgtgccaattccgtagcagtttgcggatgatgatcccacaatgctgacaaaattttcccctgttcagcgttatagcacgcgcgtggatcagccgttaaataacgattaaaaagtcgggtatttaataagcgaatcttcaaagttaaataaccaccctttttggttttcatcccgtccactcctaaattgtttttatatcagcattaattatatcttactatataaaactaattttagcgagtaaaaaacaccatggtcaaccacggtgtttctaaagaagctgtttcaattgttctgcttggacactgcggacttcttcgactactactagcgcctgcttgtcaatcgttgagaccaccggtacgagcgtcgcgagttgtttggccgtacaaatgacatacagcatcggtcggtcattttgactatagtacccttgcgctttaatgatcgtgatgccctggtggaattgcgtcgacaatgtttgggcaatcgttgcatattgatccgaaataatcgtcaccgcgcgttttgccccaaatttagccaacaatttattcaaaacgactgctgataaatacaattcaataatcgttaagagcatattttggaagccgataatgaagccggatggaatggcgacaattaaatcaaaaaaaagcatcgcagagccgttttggatccctaaatagcgattggcaatcttcgctaagatcgtactaccagcaatcgtcccttggcaatgaataataatcgccattgcaatccccatcaagacgccaccaattatcgtcggaatgatcgtctgtgtcgtatggtagccgataaaatgcgggagccgcaagaagatagaaatccagagtaccgcccagaccgaataccagatggtttgcttctctaaatacttaaagccgacaatcactaataaaccgtttagaaccaaattcgtagcagctggcggaattgctaacgcatagtagccaatcgccgttaagccagtcacgccaccttcaccaatatgatgaggaatcaggaaatcattaatcgccaccgcataaatcaaggcgccaatgataatcccgagaccatttttaaaaagtgcttttttctgcatcccactcacgtcctcgttcaaactaacataagcgtaccatatttagggtgggagattaaagaacaattgattaactattaatttacaatactctatatttttcctgtgctaagaaaccatttacttactttagaacactctgccagtcattacttgaagcccatccattgtatatacttccacaatgtccctatcaacaatcagcaatacatcatcaatatttcctgtaatttgacgcctttcaattttcgatgttgcccattgacgtctttcaaaatataaccggtcctgatactttttcaagacaacattttgatagatttttattcgcgcgttttataatcaagttagccaaatacttttagctaattgataaaataaaaaacaccaagacaggtaaacaccgtatcaggttatgctgacaaatttgtccaaaaattcggattaaatttgcaatctacccaataaacaaattaactgtacccaacgcagtggcggttacatcatccgcgtcatttcgctctgatgataactcggctcgctgcagtgctagttgctcatcaagccgcagttgttcctgctcttgaatttgaaataatcgattcttcggcaatcgccgaccgacaaaggcgtgggcaatgaaaccgatgattggcaagaacaccagcaccagtagccaggcccaggtcgctgaaatatctcgcggttcacggaacacagtaatgaacgccaacaccgcgtttacatagataattgtttcaaaaataaaatgtgcccagttcatctggattggtcctccaatacgcataaatgctaatttcatcttactcatctttaggaagcaacgcgacccccgtattgtcaatctaagtgcaacagtttctagtctaatcctataagtggtacacagcttagagttccggcatcagttccgccgcactccggtagcccaagatacgacgaggccggctgttgagtgcgtcctggaagctctgaatatcaatgatgtcgtaatggtggagtgagcgacctttcggaataaactctcgtagaaggccgttctggttctcatttgttccgcgctcccatggtgagtacggatgagcaaagtagacatcagttccttctactgaatctagttgtgcgaactcactgccgttatcaaaggtgatggtggtgaagtattccgcaccgtaatcatcaatgatggactgaagtcccaccttacaggtacttgctttgtagttagcgagcttgatgatgatttcgaagcgactcatccgctctgtcaaaaccagcaacgcaggttcgctatcaacgcgcttacctttcactaaatctccttcccaatggcccccttgccgacggtcttgaacttcaatgggtctttcatcaatcgaggtaccaagcttcgtcttattggtgcgggtatgggaatggcttcgtttaattcgcaagttggatttgcgcggtaagtcgtgggtccgtagttcgaatctaccggcctcaatatcccggtaaaccgttggtgttgaaggaacaacctcgtctgcgtgttcccgtttgaaggtgtgcacgaagctgtccacactgtgtacgcgtggacgttgcttgatggcagcggcacaggcggcgtagaactcggggttcttctcaagcatcgtcttggggcgacaccactcccgccgctgagcgtgcagataagctgccgtatcagcaaagtaaatcaacgctaccttatgcccgggaattcgctgtagaacgaagccacgagtgatctcacgcgaaatagtactacgagagcggttgagttcgcgggcaatccgtgcttgggagaatccctgattgagcagagtttcaatgcgaacgcgatcaaaatttgatagttgttggtaagccttagagctggtacgcttgatgttggtcatgatgtgcctttcttatgtgcttggttgcttataagaataggtcatcatggcctttttggtctatttaattatgtgttgcacttagattgtaaacgcgggtcttgaatataaatagcaaaattgccacaatcacaatcaacccatccatcattcttagaccagcaattgtggataactgtgtcatccgactagttaccaagatagtttctgcgattacgatcaagacttttgagaacttagcccatatcgttgtcactgcggaaacattcatcaatgcgtcaacagacgtttgatagacgactgcagcttgttgcaacaataaaacatccggcagattgcgccctgtctcccagttagaaatagcctgacgtgaaacatttagttgtttagcagcctcagactgtgtgagccgtaattgattacgtgccctctttaaattggccgagagaatttcaccttttgtttgcatcatcttcactcctaaaaagtaccagtagcttgcttcattgacgagcaaggaacgcttgcatccgcattagcacagtgtttgtagaccaaaataaaatcataattgctaagttatacattagcattgatgtgaatagacttgtaccatttttttatctacgagtatctggtatttcaaagaaattgtctactatctcagcgacggggccgtcaacagtaagcacagtaactaggcggctgcatttgaagcttgaacagaaagctttgaacaatacttttacacacacagtaattggtgataaattatactcaaccaaacgaacaactactggaggtgcattcatgaaacccgaaatttctaaagatatcattcggggacacacgacgaccatcattcttaatattcttagccagggcgacagttacggttatgaaattgctaaggccgtccgcgaactgagccacgatgcatatgaattaaacgaagccactttatacactgcttttcgccgcatggaacgcaatggtgatatcgaaagctattggggcgacgagactcatggtggtcgccgaaaatactataaactaaccgaacaaggtacccgcctactcgcaaaaaacgtcgcagactgggcgtttgcaaaaaagattattgatgacctgattaccgggaggattgatgacaatggacacaattgatacgatggttaaccggcgtttggatgaaacgtttaaggcttatcctgacacggaagaaatgcatgaattacgtgaagagttggctgctgatttaagtgaggtcgcccacgacaatgaaaaaaaaaggcgccaccatcacggacgccgtcaacagggcttttgaaggattaggcaatctcgacgacttagtggatgaaattaacgccgaaaaaaatgctactgatcaagatactcattccgacgatgccaaacaaacgtcacatgagcatgcctacaatcacggtcaccacatcgatattgctgatggcaaggtaattatcgatggtggtaaggtgctcatcatcgatgacaatggtattaaagttaacggtggcaaagcggtaaatattgatagcgatggcatcaacatcaataacggtacgtttactgtcacaaacgacggtattcggatgggtaatcttgtaatcgacaatcgtggcattcacacggacggcggcaaaacagttgccggttcgtttgcggaaaaaaagcagcaaccacataacgacaagttcgatccccatgccaatgacgacacattttcaaacttcgatcagcaatttaatgaacaagaaccggtcgatactgaaatctacgtggacagtttagtgcttgccaacgaacaacaattttctgccgatcaagttcagcgaatcgactttaagtatgctgacagtagcgtccgaattttaagcaatcccgatgatgatcacattatcttccgggaatacatgaaccgcgctaatgacagctaccttgcacaaactaagttggagaatggtaccctgtcaattcataacggatcacggcctcacctgttaccactgcgggttcgtgttcagctactcattccagcatcctttgcaggtgatttactggttaacagtgcctcaggtagcgttaatttcagccataccggcgctctgaaccaggttcgtttggaggcaaacagtggttccattcgcattaatggtgcccactttaaggatttagatgtcaacgcatccgctggttccgttcgcattaagcaaaccactgttgcggggctattacgtgctcgtgctcatagcggttcaattcgcttggctgacactacggttgctaagttcgatgtggactcacactcaggttctgtccgcggcactgacttgaatggtgctggtgcgttcaacgccaattcagggtcaattagcctaagtttcagtgatctcactggcaaccttgataccacagcgcactccagttcaatcaaactagaattcgctaagggcatcgagtataactttgacttggacgccaaaagtggttctatcaccggtcccgataacgctatctacgatcacaatacgactaacttcaaagatggtgcagttggtgatgacgacccacatttctatgtcaccgcagcaacaaagtccagttcgatccatgtttcttagtctcattaactggttaattgtttcaacatcatgtaatcaaagtaacctaaaacatcacgctgatattaaaaaatcagcgtgatgttttttgcactttatttagttacttcaggaacacgcactaaatcacgtttgatcagttcctgtgcgatttgaaccgcattcaatgccgcccctttaagcaggttatcagcaacgacccacatgtgataagctcctggattttcccggtctgctcgcatccggccgacaaacgtttcgccatgaccagctgcgttaatcggttgcggataaacttggtgtgctggatcatcctgcaatacgacaccctttgaatgagccaatagagcctgcatatctggtacggctggtgtttggttcgtttcaaaataaacactttcaccatggccaattggtacgggcacgcggacacaggttgcagataccttaagttccgtgtcgttcatgtcaccacgtaaaatctttttagtttcgtgaatcatcttccattcttcgtgcgtgaagccatcgtcctcaaagacatcaatctgtggcaacaagttaaacgccaatggatagtgatgttcagcacccttgacaggtaaaatagcagccgtctcctcttcgccttcatgacgttgttgggcctcatcgaataactcgttcattgcccgttgaccagcaccagaagccgcttgataagtcgaaactaggacttgatgcaacttatactggcggtcaattggcgccaacgcaacaaccatttgaatggtactgcagtttggattggcaacaataccatgatgctgactcaacatctctggattcacttcaggcacgaccaatggtacatctggctccatccgaaaggcactggtgttatcgacacaaacggctcctgccttcaccgctgctggtagcaatgccttggaaactgaaccgccagctgacgacaagacgatatcgatacctttaaacgagtccgttgtggcttcttcgatcgtataagattggccacgaaaggtgcgtgtttgaccagctgaacgtgctgatgccaacagcaccaatcgatcaaccgcgatatcagacttttccaattgttgtaacatccgtgtgccaactgcaccagtaacaccaagaattgcgacattaaatgattgcattaaattacttcctttcaagtttcactccactcgatcatttagttaagccgaaacatcaaccgataatttgttggcacgataggctgccagtcgtttgacagcttcctgcaatttgtccatgtcggcggcgtatgacaaccgaacgtggccttcaccaccaggtccgaaacagctgcctggaacaacggctacctttgcctgttgagcgaccttaagtgcaaaagttcggtcatcttgttcctcatccgccggtattttggcaaacacataaaaagcgccatttggttgatccgtggtaaagcccagttgattgagtgcctgtaccagaaaatcacgacgttcgtgatactgagccttcatggctgccgtgtctgctgccccatgttgcaaagcatcagtggccgccgccatcattggtgttggtgcggtggtaaccaaggcgccatgtagtttggcaatatgctgggttagtgcagccggtgccgctaagtaaccaacccggtaaccagtcatggcaaacgtcttggaaacgccattaatcacgattgtccgctccggtagcaatgtggaaatggatacatgaggctggtcgtaggctaattcacaatagatttcatcagccaacacgagcaacttatgcttacgaatcactgcggccaatgcttgcaactgcgagtctgtgtaagtgacaccagttggattggttggataattcaaaaccagcatctttgctcgcggatgagcagccaatgtagccgttagccgagccggtgttaatacatagtcatctgctgaggtatcaaccaacaccggcgtagcgccatcaatctgggcagtcgtaatgtacaacggaaaaatgggcgttggaataatcacctcgtcgcccgctcccaaaacagttcccatcgcggccgcaattgcttctgtggcacccactgttaccaatatttccgcttggggatcgtaagtaacctgattcaatttagttaagtatgtactaatcgcttctcgtagctctggtaacccggcagccggtgcgtaatgagagcgattctgattgattgcatcgatggtcgcctgcttaacatggtctggcgcgttaaaatctggttcaccaagcgttaatttcaggatgccaggaatatcctttatttgattatcaaactgacgaatcgctgatggcacaattttgtcaaacacgggccgtgtcatccccgttaactgagcttctaattctggcatatgcattctcctttgaccgtatcaattcgcggtacgacgctaatctaaaacctgttccaaaccaacctttaattctgttaatgtcgtcactttgctcaatgctagcttgacgccaaccataaatgactcacgatcatacgtgtcctgccgaatcgtcaacgcttcgcccgttccgccaaacaacacttgttcatgtgctagataaccaggcaaccggactgcatgaatcggaacgttgtcgacaatccccccacgcacgccatccacgctgctttcagtatggtctggatctggctgttgttgccgaccagcggcgattgcatgggcagtagcaacggccgtaccagatggtgcatcccgtttatcggcatggtgcatttcaataatctccgcgttcggaaaatacttagccgcctgtttagcaaactgggttagtaacaccgctgacaatccaaagttgggaacgatcaacccacctagatgagtggaagcagctaacgcctgcaatgattttatttgtgatgtcgttaagccactcgtgccaaccaatgggactaacccgtgttgcaaggctacttcaacgttgtgttcaaccacagttggcgttgtaaagtctaaccaaacgtccgcctcaggcaactcgtcttccgtagtagcaacgacaacttggcttggcaaatgtgggtcattcccgtccgttagtgcagcatgaggatcaaacacaccagtcaattcaaaccgctcatcgtttaaaattgactggcagctagcagtccccatactgccacgaaagccagcgacaataacacgaatctttgactcactcattttctataccgcctccgtgttttctgccaacggaatatcgcttagttggtgaacgcctaagcgttgtgccaaaatggtttgctcagtgtcattcagaggaacgattggcaaacgtgggttaccaactggtagtccctgcgcatttaaaacggccttgactggtgatggtgatggatatatgaataacgcagccatctttggcatcaagtcacgttgaatctgaccggcacgtgcaacattaccttgttctagtgcgtcgtattcctgtcgcatcgctggaccatatacgtgactggcaacggaaataacgccagttccacccagtgccttcactaataacgcttgggcatcttcaccactgtaaacggcaaaacctgtcggcgcatcattaattaacgccgccaaatccgcatcactaccacactgtttaacaccgctaatgtttggcacttgtgcaagctggagaatcgtttcgttcgtcatgttgacgccagttcggccgggaatgttgtaaatgacaattggcttagtagcagcttgagcaaccgctgtaaaatgggcaatcatcccccgttgattaggtttgttgtaataaggaacaacgaccaacgttgcatcaatcccgtcaatcgcatcgacttcctgattaagggcaattgtcgcagctgtattattactgcctgtcccagcgataacgacaccacgaccggccacaatctgtgcaaaacgggtatagagttcaatcttttcttcgtgcgttagcgttggtgtctcacctgtcgtcccaccgatgacaaacccgcgtgaaccagtttcaatgagcatatttgttaatcgcgttaatgcctcgaaatcaatatgatcatcttcggtaaacggtgtgatgattgctgttaataaatcgttttgttcaaacattttaaattcctccctattggtgagaactattcggaaaaccaccgaatcatttgttttgcttcttattgctcggattcaaccgaagtcgagcatcactctcttgtcatccgatcctccaaaaactcggtaatggcggtgacacccttgctaatagcggactcgtccggcgtcattttggcagagtgcaacggtgcgtgaccgtccacccctaaccaaaacatcgtgccaggaaattgatgcagcatatatccgaagtcctcgccggtcatggccggtgccgtttcaacaaagtccacatcgggtgcacttttcataaattgaatgaacgggatcgtcaactgcggattgttttctaccggcaagtagccgccctgattcagttcaacattgacttcacactcgaaactcgtagcgataccattagcgattgcctgtaatcgctgatcaatgtgttcaatcatcgcttgcgttagtccgcgaatggtcccttctagcctggcacggccagcaatgacgttacggatactaccggcattcagtttgccaaacgtcaccacgccgctttcaattgggtcaacgcttctagagacaacggtctgcgcttgcatgataaagctggcgcaggcaactaccatgtcgttagccaaatgcggataagccgcatgcccgcccttgccaacaaagtccacgttaatttctgtcgtaccagcaaataacgtgccattgcggcatccaatcacgcctgcaggcagctccggattgacgtgcaagccataaaactcatctggtcgccattcgccagcaaaggcgccagcctcaacggccaacttgccgccgttgtcgttttcctcagccggttgaaagaaaaacaataagtcatcttttggctgatgattggcaaaataattgagcacccctagggccaccgtcatgtgaatatcatgcccacaagcatgcatcttgccgggatttgtcgacgtatatggcaatccagtcgcttctgtaactggcaaggcatcaatatcagtgcggtatccaatacaccgttgcggctggcttccttgaactttaaccatcaaggccgttggcaaacttgggatgtgatgcatggtcaaccattgttgaggcatcgcttcaataacttgccgcagatatgcagctgtttgagtttcatgaagtgccaactctggaatttggtgcaagtgacggcgaatatgaattaaatctaacgtttcagacatgcagtaccagctttctttcagtcaaacgtgctagagctttcgtaacgaatcctgaagtttcgttttagcctgcgtttttgcatcgtttactttaatcaccttagctggaacaccggcaacaacggtattggctggcacatcctcagttactacagcaccagcaccaaccaccgcgtgttcaccgacatgaacgccctcgataactactgcattggccccaatcaacacatcatcatcgatgcgcacgggttctgcagaagccggttcgattacaccagctagcaccgcgccggctccgatatgacaatgtttgccaacgattgcacggccaccaagtacggcacccatatcaatcatggaatcagcgccaatctcagcgccgatgttgatcagcgcacccatcataatgacagcgtgatcaccaaccactacttgaccacgaatgatggcacctggttcgatgcgggcgttaacttcacgcgcatctaataacggaacagctgaattagtagcattggtttccacatgcgtttgcacaatcacatcttggtgtgattcaagaaatggtttcactaccggccaactcccaaacaacgtccccgtgtgatcttccataaacgcttcaatgccatctggaatcgtcagttgacgtaagtgatcgccactaacagtgaccttaaccggcgtttgtttcttagcagtcgctatcgtatgaataatctgtgtcgcatctaattctgccatttgaatcctccttaatgattgcgttaccttacagggcttcggtgccactcttcctaaacgtgcacctgtccgctcaaggccctgtgcacaacccaaagctgtcaccccacaagcaaagtgcgcttgcacgctgtcacctttacgttgttgctcgagccttaccgagcttcggcggcactcttcttaaaatcctcatccaatgcgagcatgtcgcggatggtttcacgccggacgacgatactggcttgtttgtgatcgataaaaatgacggctggacgtggattgcgattatagttgctggccatcgaataaccgtaggcaccagtagctaagagggcaatcacatcgcccgttttcgtaaccggcaacgtcgcttcttttactagaatgtcgccggactcacaatatttaccgacaatatggatggtttctttagacgaatcttccacatgattggccaatactggttcgtactcagcctgatacagcgctggtcgaatgttatcccccataccgccgtcaacagccacgtaaggcaataagctggggacgcgtttgtttgcgccaacccgatataaattgattcctgccgggccaaccaacgaccggccaggttcaatccaaatctccggcatttctaagtgatgattacctaacctggcttcaatcgtcgttaacacggtgtcaagctgggcctccggtgattgtggatcgtcaccttccacatatttaatgccgaacccaccgcctagatttagcacttgggccgaatagccaaacgcctcatgccaatgggtcaacagttcaatcaatttctcggctgccattacaaagccggtactctcaaaaatttgtgatccaatatgtgcatgaacgccacgaacatttagatgatcatccgctaaagcctctttcagtgcctgatccgcttgaccagaaccgatgtcgaaaccaaacttactatctacttgacccgtttgaatgtactgatgcgtatgagcactaacgccgggggtcacccgaatttgaatcgcaatgttttcgtcccgttcctgtagcaaacgttgtaatagatgaagctcaacgaaattatcaacaataatcgtgccaagatgatgatccagtgccattgtcagttcatccacagacttattattcccgtgaaaactcagtcgagatgacggaaaaccggccgcaaacgccgttgccatttcacctgctgacacaacgtccgcatgtacaccgagtggcgccaacagctgatagattcccttcacgcagaaggccttagacgcgtaactcacgacgccatcaattcggtggttagcaaacgtctgttgaaaggccttcacctgacgaacgatatcctgtgtatcgtaagcaaccagcggtgtgtcaaactgctctgctattttgacggtgtccataccaccgatcattaaatgatttgtcgttgagtcaactgttgttgtcatttttttgctccttttagtttttagaagttattttggttgtacacattgtctatgcgcccgacgtcctttcggattggtctgaagtgtgccaatgttgacaaccgaaagcacagaaacatagcacgaaaaaagggggctcatttgcataggtgcgtacgcaaaagagtcccgaaaataaattcatttcgtttctgaatgtcgtaagcgccccgcgatgaatttttcatcacgacagtttgttgattattcgtcaacatcccagccaaagcgatggtcaatcgtccagcttcggcaaccgcccctttcatcagtttctatgtcgtgacccgactccgctgattactcttgttggttgcaacctcttttcacatttaattttaatgagtatatcgctcttttcattacccgtcaagtccccatttaaattttatgttcccaagtaaagcgctgtaccaacgcgtttacatttattttcatttagctattgtaattgaaaactaattcgctataattgtcagtaatcatagaagaggttgcgaagattaaaagtaactaagagtaaaacgacgaggttaacgacgcttagtgaaaggatgattcgccgaaactttgactgactcgtctcagttagggttgggactcgggttaacagcccaaggactgtcgcaactaacaaaaaagttgcggggcgctatctacgaccatacataaccggtactatatcgattacgttcgattagactaagcgcacccaatgacctcgttaaacaaagtcattgggtgcgctttttaaatgtaatcgtgggtgtgaatgatttcagtgtcgattccccttctaacatcaaaaacaatggtctgtttggacaaacaaccgtggtaagcgaggttaggatcgatgaaagtaattaagtttggtggcagttctttggcagatgcgacgcattttagtgacgtaatgcagattttacgaatggataggcaacgccgcgtggttgttgtttcagcacccggcaaacgaaatgagaacgatgaaaaagttaccgatttactgattgactacgcacgtgcgcatggtaaaacacaacagtcgatcggtcagcaaatcatcgacagatatcaagaaatcgcagcagcgtttaatatttcggcagctcaatttaaaccattggcggaccaaattttggccctaccaacgacatcatttcgtggcccagcctttagaatggctgcgtttaaggcccacggcgaaaagttaaacgcccagttactggcgctggtgttaaatacacaaggattaagtgctcgttacgttgacccacacgaactcggcttaattgccacgcaggagccaaacaacgcgaccattttatctcagacatacacacacctggccgttgcccgtcaggagcttctagcggaagacaaactgtgggtcgttcctggtttctttgcctatacaaccggcggtcaactggtaaccttttcccgtggtggctcagatatcacaggtgccattcttgctcgtggtttgcatgcgactgaatacgagaactttacggatgtcgactccatttacgctgccaatcctaacgttgtcgctaacccagcacccattactaagatgagctacgtcgaaatgcgggaactttcatatgccggtttctcagtttttcacgatgaggcaatcattccagccattgaaggtcaggttcccatttgcgttaagaataccaaccatcctagtgcgccaggaacactgattgtaccaacgaatcaatcgcagcctaagcgattaattacgggggtagccagttccaaacgttttgcagcgctctacctgcatcgttatctattgaaccgggaagttggcttcacattaaagttactcaaaatcctcttccgctaccacatcagctacgaacatatgccttcaggaattgacgatttaacgatcatctttgatcgcaatcaaattccgacagatgtcctccctcgtttgctagcagatatcaaagaaacattgcaacccgatcgtcttcagtggatcgatgattacgcgattttgatggtggttggcgaaggcatgcgcaatcaggtcggcgtcattgaccggatcctgcacccactagccactcatcatatcggcgttcaaatgatcaaccaaggggcgtcacggatttccatcatgattggtgttcgggaagcgcaggctgatgacgctgttcgcctcatctacaatgatttctttaaccaaccagttagcttgccacttcgtcaaccagcacaggaggtcactcatggttaatttgattcgggttcatggttcggaaaatagtttttacctgcttgatcaacggcaacttaaacatgcactcaccacagccgaactcagtcgtttggcacaacaagtcaacgacacagcaccagcaagtctgggcgaagtagatggtgtcctggtcgtcagtgacagtcagcattccaacgcaatcggccggatgcaggttttcaaccgcgatggcagccaagcaagcatgtgtggcaacggcttacgaaccgtcagccgctatctcgcagaacaaacgcaccaaacggatttccaagttgaaacagatgtggctgatttaccagttcatcaagtcacgccgtttgcgccagatgtgcctgcattcagtgtcagcatccaacccgtcagtttcgatgcgacttcgattggcttacatcaaatcccgacaacaccacttttaaatcaaaacagcttgccatttgcaacaaattccactgcaaacttttccgctgtggcagtgccaaacccacatttgattagtctcacagaccataaccatcctaatgccttaacaaccgccttcctagggcaactcggacaacaattaaatggtcaaaacccgtggttccctgacggcgtcaatgtcagctttggttgggaaatcaacgacactaccctctttgtgcggacgtttgaacgcggcgttggttttacaaacgcctgtggtactggcatgtcggccacatcgctaatttgggtactgacccacccagccgctcagtttgaccaactcctgaccatttataatccaggcgggatggttcaaacgcgtgtccatcatcaaaacgccgcgtacactatcgacctaatcggcaacgcgaccttcactgaccatttgcgtttgagcgaggctgacttgcacgccgggaacctcgccagtgcagaagtcgcggcaacacaagaagagaccgcctatcatcaattcgtatcacagttaccgcattggtaatttggctatgtccgcccaactgcagacgaacactaagtttgctaaagagggaccggtttcgcagtctagctacgaaaccggtccctttctattgtgatagttattctctacaaaattggtgacaataggcgtgaaaatatttgtttgaacttacgccaatacgattgttgggcgaacgtctcgtaagtcgtcagctcactgacgcgcatatcagcctcaaacaacttagccaactctgcggtaactttaggatcgtacaggaatgcattgacctcaaagtttagtttgaaactacgaaaatctaagtttgccgatccaacagatgcgactccgtcatcaacgaccattgttttagaatggataaaaccgttgcgatatttgaagatttttaccccgttacgagacaactgcttcgcgtaatactcggttgcccggtacacaaacgcatgatccggcttgcttggaatcataatgcggacatccacgccactgccagccgctactcgaagtgcatcaaggacagagtcatctggaattaagtacagcgactgaatccacagccgtttgcgtgctgagttaatcaatcgtaagtagcccatcttaatctgctctttatcagaatcgggaccagatgacacgatctgcatgttggtttcgcccttcaccttagtgatatggaagaaatcattggtaacgtttagtggtttggtacgactggtagcattccaatcacggataaagcgtgactgaagcccgtaaacgccagccccaacgatgcgaagatgcgtatcacgccagtaaccaaacttttctttacgacctaaatactgatcgccgacgttaaaaccaccggtatagccaatagctccgtcaatcacaacaattttacggtgatcacggaagttcaaccggaaatccactatcgcactgcgcgtttgcaggaagggatatgcttccccaccagaggcccgtaatggatcatagaatttgggccgaacacccatcgaaccccatgaatcatataatacccgcacagccacgccggcttccgctttacgaatcagcaaacgcagcaattcgttaccgatgtcatcgttatagatcgtgtaaaactcgatatgaatgctctgtttagcctgctcaatgtcttcaaacatctggtggaacagcactttcccatcagaaataatgtgcacccggttgttgcgagttaaaaaggcttgatcagactcaatgttaagtaataattgccgttatccgctactaattctagtaggtagtattggtaacaataattgacatctaagaattcgttatgaatctccacctattttcctccactgactactttgttcgttcttggtacgcaatctgaaccactaattgatagggatcattgccttcaaccacgccactacgcccggccatcttgttcgggccacccgtaatccaagtatgggcgactgcaagttgataatcttgggctaggtcttggattggggttaagccaaccgtcgtaatctgcgctaacggttgtttggcaatggcgttaatccccccatagagcacccaacgatctgcttcttgtttcatttcataaaacggtaaagcaacttgattcccaatcgcataaattggtcgctgcaattgttgcgcttgttcatatatatcattatcacttaagcctgcgtaattcaagctaagatagccagattcaatcagttcgttaatcaaggatcctaaacgttgggtttgttccgcgtccattgtcagttgcgcgggcaagagattttgttcttcaaataagccagtggccggttgaatttgtgagatcacttgcgttttggtggttaccccatttagtggatgtggcgcgtttggatcaccacccagcgctttttcaatatacggtgaaatatcgatgaccgcatttttgccccgataatagaaatacaggttcatcactgcaaaatagaataacaccaaaaagacgaggaggttaatcacacctcgtccaaccgcttgagctttaaagtaggtcacactcttatatagaagataaaaatcaccaattaaacaaataactgaaaaaaggcgatttttaacgcgaccattaatatttaagtaaccgaaataatggttaataatgtctaaaaaagttaacacgataaatgtcccccttattgcgcgtaaaacaaattattactgcgtagcagtggcactgctactacttgaaaccactttagcgctactacttgtgttagcagagctactgcttgccgtggtcgtgttagctgactcatcattttgtggtgttgttgtctgctcatcatcagatgattgtgagttggcatccgtatccgtccgatcctgacttgaaacagccttagaagaggaattaacggttgattcagaggtcgatgaggattccgattcagactcagattctggttttgatgtattcatgctgctggttgaacctgtggttgcactactacttgaaacaaatgacgactgctctgtcttggtgttttcaacaggtttaaccgtatttgccacaatgttggtcgcactcattgcgataattaacgaaataatggcggctggtggaataatgggtggtgtgtgatatgccattttaacgctccctttctattatgcttggcagtcttcacagaggccatagagttcgaactgatgaccttcaatttgacaatttggaatttgctgactaaaaaaatctaacggacacattttcaattcaatcactttgccacactggcggcaaataaagtgatgatggtggcgatgttcaaaatcgcattgatatttaacgtgggcctgttcaccctctgtttgttgttctactaagccaagttgttcaaaatctttaatgttgcgataaatcgtattgtgactcattcccggaaaaatggcgcgcatatgctcgtcgatttgagtcacgggaatgtagcgattttcatatcccgataaatactgtagcatctctcggcgttgcttggtaattttgtacccatttgcgcgtaatacggcaatggcagtggttatttcgctcatttaatacatccgctcctctcgattaatcgatacgccattctagcacatgctttctaggttgtcaggcgctggcgcttgttactaccaacttcaatttagttgttaccccacactatttaccattatacccttaatcccataaccgttagctaagcacaactaaatttcaccaaattttaatgaatccgaatacaaaatagttgcattatctcaggctgcgcgttatgatgtaattcagatgatttttaagaaatcgtcttcattagccttctatcagtatttatagtcatttgaagggagattttacgatggaatttactagtcaaactaataattggtatcatgtttcacttgatacgcaaactcaaaaatttatcgcaactgcaacgaacaatgaaaaaatcagcgcaagtggtattacaattgaacaagccgtacaaaaactcagttataaagtgaaacaaaccaattcggttaaccaacactcatttgcataagggttaaccatacgttaaaaggaagcctgtcgaacgcgttcgacaggcttcctttttattttcaatgatcaattttttagggttgcgattaatgttgctaaggcttgcttagttgtttcccagtcatcgttaaccaacacagttgcccgttgatttaaatgactcggtaacatcagatcccgcttaaattcagcactttgaatccgtttttgaattgcttcaggactatccttccgtttttcaaggcgcgtaatcaacgcatctgtttcagaaaccgttaagaacaagaccgatgcttcttcggggaacgtctctaaataagtctgtgcccctttggtatcaacaactaggctaatcagctgtgctttttgccacgccaaatctaacgcttcatgtgaagagccatattgatagccagaatagctcaccgattcaacgaggtgcttttgtgccaaggtgtctggtgtttcaaaataataatccaccccgtcgacttcattatgccgtctaggccgcgtggtatgggtaaccacttgtggaatttgaaaggcctcttttaaataatggctcaccgttgttttgccactacccgtggcgcccgtaatgactaatagttgttttgtcactattcattcacactcttctattcaggatttaaataaataaaaaagtttggcggcttaatttaagcagacgccaaacttttttattcttttatttaatcttataaacgacgaccaaagtcaggtttgtaatattgcattgacatcgttgttacattttggccttctgttggtgcgtgaacgtatgagccaccaccgatatagatcccaacgtgatgtgctgaaccaacgccaccccagaaaacaaggtcaccaggttgtaattctgataatgacacttttgtcccaaccgtgctttgttcttgtgatgtccgtggtaagctaatgccggccatcttagcagcgtaccaaactaaaccagaacaatcaaaaccaccaggttgtgcgccaccccatgcatacggtgtgccaatgaattgtaaggcattgccaactaatgaaccagtgtttgcaccagatggcgcaactgtcgttgtttttgcaggcgttggtgctggtgtattgtctgaacctgttttaggtgcaaccgttggtgcgattgttgctttttcagtttcttttttagcagcttcaacagcggctgctgtttgagcatctaattgactttgtaagctagcaagctgtgtcttatgtccatccacttcttgttggaaacttgcttgttcattttctgcatctgctttaagtgatgttaactgtgcttgatctttttctaactgtgcttttgtgttaactaagtttgcttttttagtcacttgttcttgttttaaagtagctaatttactttctgagttcgctacggcgtccattgcttccttgttagcttggtttaacttgccaacaactgaagcacgactgaccatatctgagaaactatcactattgacgatgaagtcaacgtaaacatttccagaaacactatccccagcacgtttttgaagcgcaattacttgttcttttaaaacagcttttctagattggacttcagcttgaactttaacgattttttgagccacttcagtaatttctttgtccgttgatgcaatgttcttttgtgcatcatcaattgcaacggtcttatttgacacttggctatcgattgaagcaaccttatcttgtgcagcacttaacttagctaataaagccgagttttcagcactaaggtttgtcattgatgcttttgtatcagcaacttcatcggcactgactgcaccaatgctaaccgccattgttgacccaattgttaagaatgctagtgcactgaacattaatcgactgacttttttcactgaatgattcccctttatcatttttaaaaatacttaacttatgtacggttttccaaccaagaacaagtgtaacattcaactattacagaaatgttacagcttagttaccgtattaagtctaaatcgggaattcacgctacttgttagcggttaacgcggcttggattttaacccattgctcatgacttagcaaaaccgcggtttcagtcccacttgcatcgacaatttcataaatgagcggtttgacattgacctctttgataatttggttcagcatctttttagcgtatagtgcctgaatttttttacgtaacattttctatactcctcgagcgtgattaattgtgttctcagcacaatcagcttagaataaaagcatcttttattatgaaatgaggtttatgcaaatgcaaatcacaagacatgatcaaccactcgatacaatcggcacaccaccagccgtcggcacacagttaccccaatttgaccttaaaaatgccgctggcgaaacggtgacttctgcgcaattgctcggtaaacggactttaattagcgtcgtgccagacattgacacccgtgtttgcagcattcaaacaaagcattttaaccaagccgtcgatcaattcgaagacgtccatttctacacaatttcaacaaacaccatcgaacaacaaaataactggtgcgctgcagaaggcgttaagaacatgcaactcctttctgatgaggcactcagtttcgggaaagcaatgcaactctacgttccaagcaacaacacgcttcaacgctcaatctttattttggaagcagatggtacaattagctacaccgaattaattatcgaacaaacagacgaaccagattatgcagctgcattaaatttcttaaaagcagcccaataacaaccccaaaacgatggttagaactgactcagtttaaccatcgtttttttttcggttattatgtaaaattattcacaacacccttgataaaacctgagcaatattgctccaccttatgaaatgacgtattatacccgtattagcatctcaaattaaactttattaaggagtccccatgaccgagctatctaacgagcttttccaaactttcaataaggtgattcaccattatcgccattattatggcatgcaattttcatccgatcatcgctcagtcagccaaattcgcattctaaaacgccttaatatcgaaaacggacaaatgcagggagccctcgccgaaagtctcgatattcggccttcatccctaaccgaatgcttgcacaaattagagtctaaacactacattaatcggcggcccgatcatcatgatcggcgaatcacccacgtcttcattacagcggcgggtcgagcggttttaaaagaagccctcgatggtcgcaatgaatttacggagactttattcggtagcctaacccccgacgaacaacaagcgctcaacgaacttctaaataaattagaagatacgttagccgacacacaacattttgactttatggctgaattcactaaacgcctcgcccaaaccaaactataatcactggaggaatcgtaatgcgcaagatacttgaatatggtttagccggtgtggtcgcctacctcataagtcgctacttcgtgtggcacattgtcttaccaacactcaacagttatccacgcttaacccgggttatggcccgttttccagcaacgacgctttttctgattctatttttaacccttacattttggttgggctgggtgcaatgggaccgccgacaactatcgccaatctatggttatctcgtctacagcgtctatctgctcttattattcattatcttattcaccaaagcaaacgtctatcatgcagttagcttgaacccgttcgatttcattcaaaaggatcacaaaacactgctcgaagccgcactgaatgtcgtttacttcatcccattaggcggtttgtaccatttgaaagcctcatttgttgaaacgaacatcatagcgctcttaacgattctaggcattgagattctccaattcgccttttatctagggactttcgcactcagtgacatcctcttaaactggtttggctgtttaattgggtttggcctttggacacttgcacaacatcattttacagtccaaacaaaaagcagctaggcattaagccaagctgcttttttaacgattgagcgtaattaactgcttataaagttgattcgttagaagtccaattgaaggattggccttatattgattcgataataagacaattcctgaacgcccattctgactcatctgtaagctagattcgaatccagattcgaccccatggcttgtaaaataatctttgtaattataaacaccacccgtatattcaccagtagtcgatgagcggagcgtttttaataacgattttttaaaaacttttccttgaacaatcgcctgttcagttcgaaagaggctactcgttgtggcatacatatttccggtccctaactcacgcatatatacgtaacttggttcactaactggcgtgccatagccgtcttgttgatagccataagcagtcgcttgttggccggtcgtttcatttggcataaaattaaacgatgttaatttaaacggtattatcaactgatttccaactaactctcgataactcttatgggtgacttgttctaaaatcccggccaaaagaaggtaattaactggcgaataattatgctgaccaatatctttaacagccaaatgatcaagcgcatattgaatccgcgcttgatctgataattctttttccggcgcagataattcagtcagtccagaacgcatatcaaccatcatcttcagcgtaatttgatccgcctctttaatctgcgggtaataccgacttaacggtgtcgctaaatcgatgttcccggcttgcacctgtttcatcaataacgcagccgttaatgacttttgaatcgatgcaatctgatacgtcgtctgtggagaattcagttgcttagtcgcaaaatttgcatagccccggccaccttgaaataacacatgattccgccgcacaattaaaatggtcccgctaaaactgttatcatatagcaactgctgtacaaattgttgttccttcgcactcaaatgattgatggttcgatcatcaatcccggcttcatgactttttgccttttgaatggctaactcaagttttgttgcctgtaattgttgctgaagttgtttcattttttgttgggtttgttgagtttggacggcatatttttgccgttcatgataaatcgtgccgccaataattagtaggatgagccctaccaacagcagtcctcttttcaatttgttgtccatccgcttagtccgctaatcgtcccttctcaatgactaccatttgagcatcgaatcgataatacagtgcttcaccattttcaacttccacaccatcaatatcgcgatctgaaatctgttcgatcaccttaatgagcgcacgcaaagtagaaccatgcgctacaatcaattgatcctggcctgcaagtaatcctggcactacttgatcttgccaataaggtaatagccgttgcgttgcctgtgcaagactctccccgcgtggccgactcatcggtggaactagtcgataacgacgggcctgcgaaaaagtcgtcaataaaggtgggaccgccgtgtaactacgccgccagcgggcaacttgatgcgcaccaaaaatagcccgcgtcttttccttatttaacccgcgcaatgccccataatggcgctcatttaatcgccaactcttcgtcattggaatggccaattggtctatttcatccagaataatgtaactcgtcaaaattgcacgcttcaataacgaagtatgcacatgactgaattgaattccggttgcttgaatttgtcggcccacatgctgtgcttgtttgcgcccagcagccgttaatggcacatcagaccaaccagtataagtatttaattgattggctaaactctcgccatgtcgtacaattactaaattcgccatgcgttaaactcacttttcctgtcgtttaaaataatccctttcagtataccacgaaccgtttcccgtgataaataacgcggcgtttccctaatttaaaagatcgtttaaatagttaaggaactgtacagttttgttgtcatctaccaattaattgtagtacaatgaatctattgaattctaaggatgtgcgatatgtcagctaaagcaaaagaattttggaaatccactatacaaatcattttattagcggccgtgatggtcggcattgcgcaattactgcttaaattcgtcattgccaatgaacaaattttcgggccatcaatgcaacccaactttacacagtatgatcgggtcattgcactacgccatacgaaactgaaacgcggcgacgtcgttatcgtcaaggcccctgattcaccaggtgaattctacattaaacgaattgtcggcatgcccggtgaaactgttcgcttcaacaaggatcaactctatattaataataaaaaagtcagtgagccttatttaaatgattataaaaaagatccaacaaccttcctagccgggtcaaactacttcacactcaacccaaagactaataagccaaactttgatttaaaggacgtgcttggtcgttccacagtccctgcccaccactacttcgtcatgggtgataaccggactgtttcaaaggatagccggtatgaagaagtaggctttgtcagtgatgattctaaaaccttcaacgggattcaaggcgttgtcaaactccgctactggccagtaacgaaatttaaagtttactaatcacgaaaaaaggtccaccacgattgtggcggaccttttttgaccgtttttttaaagatagacactaacaccgagtaaaataattgctaatagaccaataatcgccattaatggccaaacgaattttaaccacttatcaaacgttacatggaccattgccagcgaggccaagaccaaaccagttggtgtgataaacgacataatgccttgtccccagttataagcactaataataacgtcacgattaacaccgactacatcagccaacggtgccatgacgggcattgatagcaccgctagaccggaactcgacggaatgaagaatcctagtagaatgaaaacgaagaacatcaccgttgagaagataacaccactcatatgggaaacgccactacttaaccagtacaatagcgtatcactaatttgtgcctgttccataataatcgtcacgccgcgtgctaaagcaatcacaagggctacacctaacaggtcggaagcccctgcaacgaattcactaacaaaatctttttccgataatccggaaataaacgccaaaataaacgtaatcgctaagaataacgaggaaatttcattaaatagccaaccccattccttcacgccgaagaccatgatgacaaaaccggccgcaaaaataattaacatcaatttcttccggaaatcaaaccgtggtacttcattgacatcactatttcccaggaaatgtttttccaattctgctttttgattataaatgagcgattggcttggatcctgttttactttttcagcataccgaatcgtgtagaaaatacagattaatgtgcctagaatcagcattacaagccttagtcccataccatctgtaaagctaatgccagccgtattagaagcaatcacgacggaaaatgggttcaccgttgaagccattgtcccgattgaactgcctagataaatcgccgcaattgcgactagcgcatcgtagccagctgccataaagattggcactagaattggatagaaagcaattgtttcttcagccaagccaaaggtggtcccgcctagggcaatcaagctcgttacaatcacgattaaccaggcttctttacttttcaaacgttttgatagcgccgccattccggccgcaaatgcaccggtcttattcacaacgcccacaatcccacctagaattaagacaaatgtgataatatcgattgtttcagataacccttgaatgggcgcattcagaaattgtttaatcgcgccaaataagtttggtttatgctgattgagtttttgatatgtatttggaatcgcaactggtttatacaccgacccatccttaaacttcgctaaatccgtattaacgtggtatttcttcagtgttgcttgtgtcccaggtgctgtcgattcatgcccattgggtgcgaccacagtgaagttttcctgggtcgtgttatattgtaaactcgcatattttccggctggcataaagtacgtcaagatcatcactgccagtaaaacaagtagaattactgtgtaggcgctcggaaaagtaaagcgttttttcttatcagtcattcaataacctccataacgccctccatcgctgaagagccattttataaactcaattatatcacaaaggacgcttgcgctttttccataacacccttgcacagactactttcctgtgctaagattggcaccaagcaaaataagggacgacagagagcgtcctttttggaggaaaactgaatatgaaaactattacggcacacagccaacatcgattaacaagctaccagactaaggtggtcgcctcaacgacggccggcttcggtctcgaaaacatggacgttatgttcttgtctttcaccctatcgtccatcattgcagatttgcatctcagtgggacacaggcgggattaatcgcaacgattaccaatatcggaatgttgttaggtggcgttttttttggcgttttagccgaccgcgttggacggattaaaatattcacttacaccatttttatctttgcttttgcgacagcggctatgtcatttgcccacacccttcccatgatttatctctgtcgcttcttagctgggatcggtgctggtggcgaatatgggattggcatgacggtcttagccgaatctttccctaagaaacagctcggacgtgtttcatccttcgtgggtgtcgcaggtcaacttggcgctattgccgcggcacttctagcagcgtgggtcttaccacaatttggttggcatgcactatttctattcggcctattacctgttatcattactttttttatccgccatcatctagtcgaaagtacaacgttcacttctgaatcagatcaaccaaaaggtcagattagcgctctttttaaaacacgcgaactagcttaccaaacagttgcgctgatgataatggcaatcgtccaaatcgctggttacttcggtttaatgaactggttaccaaccatcatgcaacaacaaatgcacctcagtgtggctggttcatcaacttggatgttagcgacgattgccgggatgtcagcaggcatgttgactttcgattggattctagaccgaattggtccacggtttgcttttgtcttattcctgattgcttcagcagcaggcgtttacatcttaaccttccccaatagcatgggtgctttattgttcgtcggtacaattgtcggctacttctcaaatggtatgtttgcaggctatggcgcgattgtcagtcgcctctacccatccgaagtccgtgcaaccgccaataacgtgattatgaacgttggccgctgtatcggtggattttcgagcgtgattatcggttggttacttgatcattattcggtgatgaccgtgatgctcttcatttcaacactctatatcatcagcttgattatcatgctcaccatcaataatttaaaagctgatcgctactttaatcatcaataacacacaaaagggtcgagacaattgtctcgaccctttttaaatttataaactaccgccgcgtacctcggctacgttagccacaatcgtaaatgccaaaggatcaacttcatgaattcgattaataatgtgttgataggcttgattttcaacaacgagcatcaacatctgcttattgtcattagaatagcccccagtaacatcaaaaatcgtcacgcccacatcagattcttcgattaaatgggctttaatttcaggtaattggtcgttactcatgacatagaggacctttttccggttcaacccggtctcaatatagttcatcgtaatcaacgtcagaattgatgaacaagttgctagcatgaacgtctcaaaaccagagacgaacacattcgcaaagcagactagtaaatcaactaccagcaaactcaatgccggtttgatattgaaatattttttgaaaattaacggtggcactgttgagccaccactcgaggcatcaattcgatataacaaggcaattccggcagcgtaaacaacactcccaataataattgctaatagtttgtcttccaccaccatcatttggggcgttaaagctaaacaaactggtagcataaaactaccaaagagaattcttaacgtggttttcttatcaagtaagaagtaagcaagtatcagcatgccgatgttaatcacaaacaccactgttgatatcttccaccccatcaattcttctaataagatccccacaccggttgccccaccggctgctacttcatggggggcaaagaagagttgaatcccaatcgcaataatttcgagagcaatcaagatcaaccccatctggataatcgtctgtttcaaattggataagcgcatcgcgtccctcatttctttattgattattactataagtatatatgaatattaatgaagatgcgagtctaaccacttcatgcttcccgtagtgcctgtgcgagtgccactaatttacgagcggtgttggcattccgaattgtcagccactggtataggtcccctttagcaacagtcgaccaccgcgtccgaccgaatgttttcacgggtgcactccagaaaataaacggaccattcacggcaactttttcatacgctggcttaattgcccctacatgtacactcaattccgcccccgttttaggcgcaatcgccacgattaaattatgtttcacatctggcatattgccccaccaagttggtgcgtccgcaacagcttgaatcaactggtcagctgtgaccacggcgatattcacagaaaagccaaaggtctccaccataatctgatcacaagttgccgctaaggttgttaagcctgtttctggggcttcaaataacacgttgccactattgatgtatgtttgcacattggtgaacccagccgcttcatacgcagttttaagcacgctcattttaactggccgtttaccacccacattaattccccgtaataacgcaatgtattgcatctgaatccctcacttttttattcatcataacttaattagcttttgttgaccagttcgctttatcactgccatatttattattttgtggggaataataatgaaaaaagttttgcaaatagcataaatacgccatttagcttataatagtatagttataaattttcaaaaaaggatggcgcacaatgaacaatcgaactcaaccgcaaaacatcgccaaaggcatgttttgggcgactatggcgtccgcactctggggcgtttcaggtactattttggaattcatctcgcaaggacaaaagatccctgcaacttggttcctatccgttagaacgcttggcgctggtttaattttattacttatcggggcaattaagttcaaacaagatatcttctccatttttaaatcaaaacgattaacggcttggctaatcgcttacgcccttttcggtatcatgggtaatcaatatactttcttcatgagtatccaaacggggaatgcagcagcggcgactattttacaatatctaagtcctctgtttatcgttattggaaccctcgctttcttacgtaagtggccaaatcgaattgatattatctcattcggaattgctttaattggcgttttcctttctattacgaaaggcaatatccatactttaacaattccttttaattcattaatctggggaatcttatccggtgtaacagctgctttctacgttgtgctaccaagaccaatcgttaatgaaaaatcaccaattctcgttttaggttggggcatgttcatcagtggtttactcttcaatatccaccgaccattctggcaagcaccgccgcgtttaaatgcttccggtattatcgcaattttagccgttattttgattggaactgtattcgcatatctttgcttgttacacagtttaaactttgcaccatcaaccgtaatcagtatcgttgatgccgtacaacctgtaattacatttattctaagtatcatcttcttccatgcccgctttagttgggtagaaatgagtggtgcaattctagttatcctagcaatctacatcttgcaacgttatcaggaaacagaaaatgacgccttagcatagcaaaaagccatttaaccatcccataagggactgttaaacggctttttaattacgatgcgctatattatattttacttagcttaatcctactcacagctagtagggttctttataggccacgtaaacatcctgagtaacactaagtatctcattagctaatagctgcaggttaatcactactctctcttggaaaaaactgatggtaacaaaaaaggttaaacctttcggccaaataaaaaaacttcgcctacacttaaaatttcaaatcccttgtatctcattagggttctacaattttaaacataaacaaagtttttcaacttttatcatttaatattcaacgaattaataaattgataatccacatatcggccttctccactattactattggaataacgactgattaaataaatattcttctgcttcagtttagcatcgacagaaactttaatatcgaagccactctgcgccgcattatcaacagttggatagacagctgcgacatcatttcgagtaatcctattaatgcgaacccgtccaatttctttattatttgctttattcattatgatgataaaattattatttaagccttgaacgttcttagaaatatgccatcccgaaatatggaggatattaccattttggataagttgatcaatacttcctaaattacttgggccttgtggtacgttaacaacattaggaaattgatagtcaacataatcactgttaccattcgtggtacttgtatagcgactaataacgtagaaattcttgccttctaaactcttatccaccgctaattcagcactaaaaccactcataccagaattatacacattaggatatacactatgaacatcatttctcaatgaattattaactttcaagcgcttaatttctttattagtatcgacattcattacaatcagataatgcgtattttttccttgtgcataatcactcgcatgccaaccattcattgaaattttatttgaattaactttaacgttatccaaactacctaaattttgcttagttggcgcaggaacttttacagtattaccgaaatcaaagtcttttgcactcccttcaccgcttggtaattgtgcataacgcgatataaccctataggtatgtccatacattcctgagtctactgggatgttggcattaataccactcattgctgccgtgttaatagacggataggcatttgctacatcatctctcctaccacgattaattgcaatccttttatgttcttttcctgtattggtatcaattagaattaaataactgtacggtaaattattggcatcattaattgcatgccaaccaagcgcaaggatattattgctatttgcagttaattgatcaaggctaccgacattatccgttacttctcgatcccaacttgttaatccatactgctcaatcaaactgtttaacaaagtatcatagttaggcgctgtagcataaccgtcttgtttcaaaagactcgttacctcacgataattagttttccacaacaaattatgatatcgtgaatttaccgccaaaaagttcccatgatcttcgatactttcattccaactattgtattttctaaattgcgcattaactgtaatccactgaccattaatatattcttgagtgggcattgttacgtactgaccattgtatgttcccttaattccaaataagttattaccatacgttgctaaagtcgattgcccccaaccgctctccaagattgcctgcgcacctgaaacagagggtaatacaccatacttgcgccatgacgaaattgcaccatcatgaatactactaataaaactggaggtatttcgtaataaattcattgaagctctggaggtatttcgtaataaattcattgaagctggcgtacttctttgacttactttaggcgcatcataaaccccaggaccaatttcattattttgctttacagtaacttcttccttgttctttgtttctgctgctgattcactatttttaattacaccggattcagttgaattatcggtagatggcttttgttctttagaactttgactacttgctgatataatactttcattactgctcattaatgcaggggctgtctcttgtttttgttcagccgctgatactcgttgatttgttgttaagccaattaaaccaatcgtactcattaaaatactattcttaacaatttttttcacttcacaagtcgctcctagttagttttttcagacatactaataatacaatacaattacttaaaacactatttcgttttagttacaaataaaaaccgaacatcttatccacacggttaagacgttcggcaatattttttagatgttcaaggcattgtcaaacacgtaatcaaccgtatttccctcacctgaaggattatctgaataacggctaatcacatatattcttttgttaaccaaactgttatcgatattaaacgttaaaccaaatccactgtttttagagccgtataatgttggatagacagcagctacatcatttcttaaagaacgattaattttataacgccgaatttctttgtttgttgtcttatccataataattaaataactatacggtttattaatcgaagcattagcagcatgccatcccgacattattacggtattatttacacgagacaattgatccatacttgcagcactttcaataacttgtttcttaggaactccaatttgattaatgaattgataatccacataatcagcatcagcatttgccgttgctgaataacgactaatgaagtaaatattcttgccttgtaattgactgtcaactgggatatctgcagaaaatccgctcagccccgccttatatagatcgggataagcagcagctacatcatttcttggtgagttggcgatagtcatccgtttaatttctttatgtgtattagcatccattacaattaaagtgtgaacattacggccttgtgcatcatcatttgcttgccaaccgctgatgtgaacattattgaaacttgccgttagggtgtcaatactccctaaattttgtttaacaattgctggtactgttacctgattatcaaacgaatagtctacgtatgctccttcgccatttggtgtacttgagtaacgtgaaattactttatacgtattaccgcgcatatcatttgttactggaatactcaaaccaaacccactttttcctgcattggcaatattcggataaacttgtcgaacatcgtcacgttgcgtacggttaattgcatagcgcttatattcacggcctgtcttagcattaattacaattaaataactgtatggataccgactagaatccactgatgcgtgccaaccggacattgataatgtcttcttatcagcagttaatgaatccatacttgctacactggtttcttgcttaggtactttaataatatttctaaatgtgaaatcaacagtgtcggtattaccgttgggatctgacgagtagcgagacataagaacgtaactcctattatgcatattattatctaatgtcaatgtattgttaaatcctgaatgtaatgaattggtaatgttttcataaatgttatgcacatcttgacgatttacacgatttattttataccgttttacttctttatgtgtcttactatctaataagaataggtagctatatggccgattggctgtttgctgtgctgtatgccaacccaccacatgaatttcattttcagacacattaacactgttaaggctcgctttatttgcaggcatttgatcataataatgttgcactaatgcataaaattgattcatgtcatacccatattttgcaaagtaagcatctggatcagtatggtctgttccaccaagatattgtgtaacattatgatgtgaccagattgtaccaaccccattatgattctgtgccaaagatggcgttaaattatatttgtttaacaagtaagcagtgtaccacgctgagtaactcgttgtcttagcaaaatcttcgaagttacgagccgttaccatttcaaattgggcaaaatatttattaccaactgccccactaccccatgcaccataatctgtatcatgaatgtttaatattgtcctagcatcaataaaggtatgaacaaatgctgattgccacccaccattaatctcatagtctgcttcactccgagcactataattattagggttatcagtataatgaacaaccactccgttaggacgattatcatctgttttataattaaatattgagaatgtatgcaaatcttgcgtaatgtttggatgtaagtagttgtgttgatatatataattattgacacttggatagttgacaaagaaaaaattgaagaagcgtgggttgtgttgatatatataattattgacacttggataacctgctttaggcataatcgcctttttaaccttagatgaatcaataggcatcccaatatcgtcagtcttcgcttttttctcttttataggtgttgcttcttttgtatcttgactatttagttgcgttttcatttcatctggcgttagcacttgtccagcttgaacattgtttgtagcaaacaaaaaggtcgccgagaccattgtaaatccaattaagaacttcgttagttttctattcattttttcccctctagaatccttaattaacttccacgtagaatattaacataaactttaatatttttacagtctgttcagcattattaatcatataaacatttattggctattaatcaaaaaaaacgtcctgaaccttatcggttcaggacgttttaattatctttccaaataaaactcaaatcgttcgcccacatattgggtgcggacatattcgaaaggttcgccgtttgataagaaggaaacttgtcgtaatttcaagattgggccattacgcttaatgtcgagatattcggcaattcgttctgaggcgagttgggctgagacggtttgttgtgcaccgcccatttcgtagccccctttttcggctaatgctttatagaaggaagacgtgatttcagctttactgaaatcggcaactaagctttgtggcacggttgccacttcaaaacagatgggcacattgtcggcatagcgaatccgttccatgcggagcacctgctcgccatcttttaactggagcttttcagcttcgctaagtgatgggttggcaatgtggaacgaaatggttttactagatggctgcttaccttgggccgtcattagatcggtaaaactggtcacgccggacattttttcttggactttccgattagcgacgtaagtcccagccccaatccgccgttccaaaatcccttcgtcaactaatgtttgtacggcttgccgtaatgtcattcgtgagacttcgaaatttaaagcaagctcccgttctgaaggaattcgatctccaatcgaccacttgccggcttcaatatcctttttaagttgattatgaatttgaatataaacaggtgattccatgggacacactcctaaatattaatgttgatagccgttcccaaagctgtaagttgcgactaagttttgctgatggtctaagatgttgaaatcagcatcccgaccttcttctaatttacctttttgtgttaagccaaattcttcggcttggttgacacttgacatcataacggcttcaaacgtttcacaacctgtgaatgtttggatgttcttgaaggcatcgatatatgttaacactgatccggctaaagtgccatcttctaagcgtgcttgtttgtctttaacaatgactttttgaccgcctaattcgctttcgccttcagcaatccctttagcccgcattgaatcagtcacaaggtcgatccgttctgcacctttttgttcgtaagctaatttaatcatgtcaggcacgatatggaaaccatcagcgattaattcagcgtacatgttgtcttctaacattgcgtgacctgtcacaccaggttcgcggtgcttgaattcacgttgggcattgtataaatgggtaacgtgcgttgctttactttcaagcatttgttcacgcgttgcattactatgaccaactgaaggcacgatgttgtgtgctaaacagtagtcttcgaatgcttttgaaccaggatcttctggtgcataagtaattaaacgcacgcggttacctgataacttattccattcgtccaataaatcaacgtctggatctttgatgaattgttctggttgagcacccttgaagattggtgcgatgaatgggccttccaaatgaacaccttgaattaatgggttcttttcagccgctgctttaacaccgcgcatagcattagcaatgttttcgtttgattgcgtcatcgttgttgcaaataaggttgtgaccccttcattttgcatcatcttagttgccatttcgtcgatttggtcagcatcgccgtccattgcatcaaaaccataaccaccgtgacagtgaacgtcaataaagccaggaatgattgtcttgcctttaacatcttgaatttcttcgccagcttgtgccttgtagtcgaacatggggcccactgccaaaattttatcatcgaaacgaatataaccgtcttcgataacgtcgtcacctgtatagattaccgcatgttttaatacttttactgccattatccatccacctctatctttaaattacctctagtataaatggtatagaccaaaaaaacaagggattccgactaaactttgaaccgttttcttgttaatttgctatactatatttatccattcatattaaggagtttaatgatgttaaaaatcggtgttattggactaggaaacattgcacaaaaagcatatttacctgtaatggcgcagatgcaagaccgggtcgattgggtcttatgtacgcgccaaccggctaaattagcgcagcttcaagcgcaatatcatttagaaagtggctgcctatcatttgacacattactcgaacaaccactcgacgcagttttcattcacaccccaactgcaacccactatcaatatgttaaacaagccctgctccatggtttacacgtttttgtcgataaacccttaagtgaaaatccactggaagtcgccgaattatacaaacttgcggctagcaaagaacggctcttaacggtcggcttcaaccgccgttttgccccatttttgcaaaaattaaatcacttacccgataaacaactgattaacatcactaaaacacgcgtggcaacgagccaaccaacgccctttgccatttatgacctgatgattcataccattgatacggcgcttttcttggctgattcactaggtaccaattacaaaatccgtccatactgtcagcaggatgcaaacggcaatttgcaactcgcacaattaaccattgaaacaccgcgccaattaatcagcgcgactttaaatatgcaaagtggtaccaatcaagaaattgcaagtctccagacaccacacgggttattcactgtcgataatctaacgcgctacacaacacaagcggcagaagacagtcgcattcaagttgcagctgactggacgtctacgcttgaaacgcggggctttgcgccaatgattgatgcgtttattactgcccttgaaactaacggcgcaaatcctgtcccaccagaaagtagcttactcacccaccaattctgtcatgagatggtccattttacaaaataatataaaaaagcgtaacccaatacagtatttgtatcaggttacgctttttacatgcttgagcgcactctatttttggctttctaaatccttcgcaattgttgcgtcgatgcctttaaccactgctgtcattaagccggcttcttccattgctaataagccggcgacggttgtgccacctggtgatgaaacttgatccactaagtcccaaggtgaatcatcactcataagcacgttttgggcactccctaaaacagcttgggctgcaatttcagttgcggctttctttgttaaaccgtgtttaacgccggcccgcgccattgaatcaatgaataggtaaacaaatgctggtgaactaccggcaagcgcactgaaagttgtgaaatctttttcgccgatttcaaccacgccccccagttgtgcaaggacatctttcacacgagccaattggtctgcattgacttgttcattcccaacaacagctgtaattcccgcgcgattggccacgttaacatttggcatgatgcgtagaattggtaaatctgcagcagattgttctgctaatttatcaagtgataaacctgctgccattgaaaccatcaatggttgatgtgctttaaaggctgcatttgtttctgctaaaacctgtggcacaatatatggttttaccgctaaaaaaacgatgtcggcttgttcaaccactgaattgttatccgcaacagctgtaatccgttgttcagctacaaaatccgcatagttcgccggatgtccgccatgcactaaaatatccgttgttgcgacttgattagctttcactaagcctttaatcattgcttgtgccatgttaccgacaccaataaatccaattttcattctgccacccctttttttatttatccaaggataccgaacgagcggaggaaagtcaatccaggacacaaaaaaagacatcttagcaagatgtctttaaagtattgggctagctggattcgaaccagcgcatgacaggatcaaaacctgttgccttaccgcttggccatagcccaatcaagtggaggagagtggattcgaaccaccgaacccgaaggagcggatttacagtccgccgcgtttagccacttcgctactcctccatacgtttcatctcatcgattcaactatattagtttacaaaattctgacagaaaaatcaaccccaaaatgcaaaaaaaatcttgattattgcataaataatcaagattttttctaatatttagttaacgccttccattaacttatgaattggtttaacgaagaagattaagacgatcccgaagatggcactcacaatcccaatccctaagaaatatctaatttctgtttgtggtgaatataaacgcacaagctgtgcattaattgcttggcccgcagcatctgctaagaaccacatactcatcatttgtgattggaatgcctttggcgctaattttgttgtaattgacaacccaattggtgaaattaacatttcagcaatttcaacgatgaaccatgaaccgattaaccagaatgggctaactcggccagcggtgccgtgtaataatccaggaagtgccataaacatgtatgataaaccagcgaagattaaaccaacagcaaatttaccaggtgcagatggttgtttcttccaagcactccataaccatacaaagaatggcgttagaagcataataaatagtggattcaatgattggaaatttgatgcagctaagctatgcccaccaatgtttagaattgtccgatcttctgcaaataaagctaggacaacggagccagattcttcaattccccagaagatagcagctgcaataaagagtggaatataagctataacgcgtgaacgttccttcttagtcactttcttgctgcccaacatccgtgagaagtacacaattggtaatgcaatcgcaatgattgaaatcatcaagacaatgttatcaatgtttaagttgcctgtaaattgcatacctaatactacggcaacgacgaccacaacaccaatcacaattttacgaataacgcttgataattcttctggcgcaattggatcattaggttttgaattttctttactgaattgagaacgaccgcggtagtattggattaaaccaaagaacatcccgacagcggctaatgagaagcctaagtgaaaatcaattttttgaccgacagccccaacaagaattggagcgacaaatgagcccaagttaatcccgaagacgaacatactgaaaccagcatcacggcgacgatcattttcactatacaaactaccaaccatttcagaaacgtttggttttaataacccagtccctgcaacaatcaaagcaattgaaataaataaagctgtcgcacccatcggcattgctaaggcaatatggcctaacataatcaagacaccaccgatgaagacggttttgaagctcccccagatccgatcacttaaccaaccaccaacaacgctggctaggtaaaccatcgaaccatagattgccatcacagacattgcagtcgtcttgtcaaagccaagaccacccttatctaaagcaaaatacatatagaataatagaattgcacgcatcccgtagtagctaaaccgttcccacatttcagtgaagaacagtgttgatagcccatgcggttgcccaaagaatgttttttcttgtttctcttccattgtaataccccactttaaaactttattattacggaaactaagaatttgatagttattaaattgaatcgactcatctatacaagaagtctcttatcattcgcttagaatctataagggctattataatcttattttaatcttaaatcaattcttttttcaacattaactgcattgtttgcactgattttttcattaaaataagttattttatgattcaaaatgactaatgcttattcttaaatgagaaaatgctcatgatacctaacatgttcttagaaaactggtttgttgcctttaaacagtagtacaatgaactaatagaaagcgagctgattccgatgaacccttttacactaacatctcttattccattacgacctgatcgttggctaacttactacgaagcaatgtatcaaaatgaacacggcgatttaatgccttatcattttgtcagtcgtgactctaacttaaccatcgagactttaaaacgaccagctaatgcctcagcggttgcaatgttctgctacaatcaaaatcactcacaggtcttactgactaaacaatttagacagccccttaatgattttgtctatggtaatcccgccggtttagttgaaccaactgagtcgattaaacaagccatttcccgtgagttaatggcggaaacaggttactctcttattgaggttgaacattgctttgcgccaagttattcctcaccaggccttactgatggcgccgttagtctagcaatctgtactcttgatcaagctaaacaaacagaccgtacacttgaagtggatgaagccttaagtaccctgtgggttaatcgtgctgaagcacagacgatcttagccaatgaaaaaatgactggacgcactcagattctattatggcaatgggcaaatgaacaataagtaatagccagttacgattttcgtaactggctattttagtggttgcttttcaatcaaattgaatattaaaaaagcattatactaacaaaacgtcagtacaatgctgattatcccgattagcacttggtagaaacatgctattgatgccggctgcaggagtcgaacctgtgaccctcggtttacgataccgatgctctaccaactgagctaagccggcattattgatgacccgtacgggatttgaacccatgataccgccgtgaaagggcggtgtcttaaccacttgaccaacgggccgaaataaaaaacgattgaaaattctcaaccgttcaaatttattaaaagatagtggactattaatggcaatattggggtatcatgttaattgttatattaaagaaagcccgagggggatatatatatatcatgagtaaaaatagaaaatctattttgagtgtaatgttattaataataatattattagctattcttgtaggattgtctgcctacgaggggctatatccgtttggtaataagttatggatacgagcagatagttatacgcagtatagtatcttttacaaatacttaagacagcaactagtacataacggaacacttctttatagttttaaattgggattaggaggcagtttctttacaataatgggttattacttaatgagcccactaagttttctcgttgtcctttttaaggatagtcaaattatgctttttatgacaattctaatcatatctaaaatcgttctttcaggtattacattttatttgtttatcaataaaagaataaaattagactatgtttatcgcttaggattgtccatagcgtatgctttgatgtcatttaatattatttatgcatttaatgtaatgtggcttgatagcataatattaataccaattgcgttaatgggtgttgatcatttgatcaataaaggtaagatatggctactaacaggcactttaacactgttattcatatctaatttctatatggcatatatggcaggtatcggtatttttatatatttcttagtagaattaatagtccttcaaaatagagtgaaatggaaatctggcattaagtttctaatttcggtaatacttagttttgggttatcagcgtggctaattttaccaattaattatgcattgaaatcgggacccaaaatacccttgcaagttggattcttgcaacgcaagcagagtatctggatagcattgtctgatctgtttagccataatacgcaattatttgatggcgctaatatatattgcggtatcctgatgttagttgctgtaatagctttttattttatacccaaaataaaaataagaataaaagtgatagtgagcgctttagagatttgtttcttaattagttatatttatgaatatccatatgtaatgtggcacggatttcaacaacccacagggtatggattcagatttagttttttaatcagtttaatgatgatattaatcactggttttgtgattaatatcggcttagaaaatgtactaaaaccattggtatatgcggtgctattatgcagcataatattgttaacgttgtataaaaagcaggtaatagataacgggatactaattatcaatagtgtaatgttagggttgcttactttaatgatattgattggctatattttctataaaaatataggaataaatataatcaagtggttaacgttagcccttattatgacagatagtattcaaaatatgcattttgttattagtcagttggatagcttacccggatacgtcgctaccgaaaaaaattggaaagaaaatgacagtcaaaatttaaagactgctttatcttatttaaagcaggaccgaacattctatcgaactgtagtaacgccaaatgcaatgctaaaccaaggaatgtacaataattttaacgggtttagttggtttaacacttttggatatcagcaattagctacaacgttatctcaatttggatatagtactactttggggaataaatcactggcatatcaagaaggaaatacgattgtggatagtttattagggctaaaatatagaatagcattgatgaatgattctatgacttctattggataccagaaggtgttcaatagtggaaactatgaagtgtatcagaataaaaatgctttaccgatcgcaattattaatgacaatctaaccattaatcaaccactcgaaggaaatgaactacagcggcagcttctcttttttaataaaaataaaagaagtgcaatcattcgaacaatagataatccaaattttactgttcataacgtaaaaataaagcaaaaaaataatggcattcagttgagcccatatggtaagaatgcttatattgagtatcggattgatatgccagctaattcagaacttctgactaagatagctgtaattgatggtgttaattcttatggtaaattagattttaaaactaaccagattatacgaaataattatcctaattttcataatgaaggtgtattgagtctttataagagttccaatcacaaaagtaatgcatttgttaaaatgcgcttaaaaggaaatgtaaatatcgcagaatctcctaaatttatactacttaatggagatgccctaacggagaatattgaaaagttacgaaaagaagctccaaaggttataaaaaagagtgagaatagtattgaattacaagtgaatgctaaacataaagagcctgtctttttttcgattccgtttgataaaagttggaaagcaactgtgaacgggaaatccgtgttacttgaggataatcatggatttatgcaagtaccagttgaatcaggaaagagcagtataaaactaagatatattccaaaaggtattaaagaaggtttcttaataacaagcgtgacagctttaatgttgatcctttttggaattaaacagcaactagaaaaaagagttagtagggaataggtaatgaacacagagagcagaataagattaaaatggattgatcgaaaaagactaagagagattatggctcttttaggaattagtatattggtagtacttcctttttttcttactagaggagtagttagaggtagtgagggtgaggattggacgtttcattttgctagaataagaagtttactgggatcattaaaggcgtatcagctgcctgtagaagttaattttttagaattttcggcacagggattgggagtcaattcaatgtatcctttcttttccttgtatctttttatttggccgctattattaccgataaaacttagattaaaagtatttatattcgctttgttatttaacatttgtgcttctgcaaatatttttggatttatcggggaattcaccaataacttgtggatcaagtcttcaattgcagttttatatttatttaataattatcacctagtactttcatataagagatttgctttaggagaactacttggctatacaatgtttccattggtggcgtggggaattgttaagatatggaaacgtcaaaaagttggaatacttttgcttgcgttaggtgtttcgctaattgctaattcacatattctatccttgttgtttttgattgtagtattaatattggctgaaatagttagattattaatgcagaagtttaattgggaagaagctcggtatatttgtattgcagcggctttgacaatcccgatgtctgcagttactatttataattttttagtgttaagtatgcataatcgatacttagcacctaatatttcggcacctctaaatgaatcttctatctttccgcaaacatatattgtggacttaaagcatacacttcatccattagcgcttacggatttaaatgcaagaacatggaatatagggaccctttttctaatattggcctttattgcaattatttatctaattgtaagaagaaaagataacgacggttattatgcatttgtaggaattatcggactcttactagtgattggtggattcgattttgtgaattgggattttacagaacaccttaaaatatttgagcctattaaagtaattcaatttttgggtagattattaatgttagcggctatattcttagtggtaccggttatgcgtatgatgattaaagtcaaggcgttgtgggcgaaatggctaataggtgttccaataataatctttctaattaatggtatgatgacaatttatagaactcagaatttttatcaggagatagtgccgactaatattttagaaagtgggtataataatcagctgcatactattgattattttccggctttttctggaccaaaaagcggtgtggactatgcggttaaagctgcgtatagtgatattaaaggaccgattatgtttggaaattcagtgccatcctttaatagtgcaacatatcatatgaggatcaaacacgtagttatgaataaatatttagtgacgccagtagcggcctataatagatttaactatcgggtgacaattgatggacagacagtaaaatggattcataaccaaacatacggaacaatcgcaattagttctaacgaattagtaaataaaaaaaaggctaagctttgtgttgttgcaaaaccattgaaaaatgagtggttagtaatgatcattgcgggcatagcaaatatggctgttatgttgaggttgattttggattttaaacggaaataggtacaacactgactagtgtcatgcaataataataagatggatactatgagtttaggaatcatggtattgaggccaaaaaagttggaggatttcacatggagaaaataactaaaaaaaaggaaatatgggcgattattttaattgttattttattaatagcgctaaatttatcgattaatttaacaggaaatgggatcacacccaatggtggcgatgataaggcgtttgctcaatttgttctaggaaaacactatctacaatttttacatagtcgatatacgggatggtcttctcgactagtaattgaatcggtattatcaacattaacgcacttaccaattctgtggcgattattaaacacattggcaatgtttactgttatctatatcccgtatctattgcttcttaaaggaactgatgatgatgagaatgctagtcgtctattgattagttttgggatgttcttcttattacctttcaatatgttctacgagacagggtggatggcaaccacaaccaattacctatgggttttagctgccggtttattagcgatgctaccttccttagctcaatatttaggaatagacattaaacataaaaaaataatttcagttgttgctttcttagccttaatctatgctgttaatcaagaacaaatggtaattatcctattattgggtaattcattgttattgtacgtaacaagaggaaataaaaaggcactggggagattggcatttcaattcgtagttactgtattgtctttgattatgattgttttagcaccaggaaatagcgttagaaaagtcaaagaaattcattggttaccattatttccaactttgtcaccctttaaaaaaattgagttaggtatttctagtacattaggtcacttctttttttcatttgatgtgcttgcgacaatacttgtgattttactttttgcgttttatataaatcagaaggggagatataaaataccgcgtacagttttctatattccggtactgttcagcgtgattttttggtttaaagatactttgattggaaaaatttatccaggattaaagaaaatggggggtgctgttactatttatgggacagatatctctttggccaatttacaatctatcttgccagatttacttctgattgtagtaagctgcattgttttattggggatattttcttcgggaaactctaaacgaatgtggttagttatggtagctatgttactcggacttatttcgagaatcatgatggggttttcaccaacaatttgggcatcaggagaacgaacattcctatttttatatgaggcacttatttttggttgcttctatttatatgatcaaattgagaaaaagaaagaatatcaaattttaacgcacattttaattggaattggtggcctagctttctgtgttattttatatacagtttaatgagtttgtagacaataacaggttatccgtgagaaactgaagttaaaattggatacagatatataataggcactttcgataaatataaaatttaaatcggaagtgtttttaatttagctaataattgatacccctatgaaactaagctagaatgcattaggattttaaacttaggtatgagtggtggttaggctggaaaagcgacgtgctagtttatacttggcgcacgtagttacctaattttacttttatttatttgtttcaaaaaatggttgcagtttcgtttaaagaggctttccattgtaatctcaagctaataattgaagattttataaagtctagaaatctttaaagaattccttagatttacaggtaacgaatagtggttagacactgtttatgctacaataaaatagattattttaaattactaagaaacggagttaagttaaatggaaaatggtgtgggatttaaatctgtgggtgttgtttttaaaaaatattggtgggtcatttttgtaacaattatcattggtggcgctgttgggatcatgactgccaaatcaacaattagttacgaaacaacagctaaagtatatgttaacaaggggtatgtcgaagacaaaaaaggtaacggtatttttgataacgatgttgagcgtttttggcaatcaattaatagtttaagtaagacacaaagctttaaaaaggctatgactaaagaggttagagattattcaagcgataatttgttaattgatagtagcaacggatctaaagtcatagctgtgaaatatactggcgctacgcaagccaagagtattaaaggtgctaagtatgcgacagagcttttgaaaaaagaagtgatcaagtatgatgacgagaagagtaagttagttgtgattgaccaggcttcaaaagatacaactgcaacaataggctttagtaataagaaaacaaattctattatgggcatcatctatggtgcagtattgggcttcatcctcagtgctattcattttattgttatgcgtagaaagaattaggagggaacgatttggttaatccgttctttatgttcattctggctttttcagcagttattctaagtttcttttttggctggtccagtatttatccaagtttttcgagtgatgttattttcttttttattgtaatgttcttgttagccggcgtactaggatactttatctataaaagtaatgtgatatcttttaagaaaattaagagtacaacaaatgttgtttggttagtggttattgttttaataggcacattagctgaaggagcctacaatcatggttttccattacagtttatgctccaaggtaaggattccggttatacagaatttggaattccgacagttcacgtttttttactcactctgacagcttttttaacaacctacttgtggcatctaatcctctcttcaactgggaagttgagaaatcaatatatactactttgtgttctaagttgtattccgtatgttttagaagttaatcgcggaatgttcatgatggtgatgataaactgttttaccatttttattctagcaatctggaagaaaattaaagttagacatataattggtttagcgattttcggtatggtgggtctgtttttatttggtgttatgggaaatgcacgagtgaacacgtcatatcaaaatggtcgatcagcttttgattcagcgtcaattatgcaaatcggtggtgcaactgaaaaatttaaaagtagtaagattcctaaggagttcttttggggttatatttacgcttcatcacccgtggctaactttcaaaaaaatgtagattatagcaagactactgaaaaaataacagtttcaaaagtaaatagtatgttttttggtgagttactgcccaatttcattggtaagagagcacttgctaattcagattataaagaggtcaaaattcaacaaattacaccagaattgaatgtcgggacagcattaagtagtccttaccgtttattggggtggattggtgttactatgtacgtcattattatctttgcgggtgcatacgtgtatctgtacttcttatataagttgaattcaagatttttcattgtcgggttatccgtcttaaatacaatatttgcattaactatttattcaaatatgattcaagcaactggtttgagcttacaactagcatatccaattatatttgcactaatcgactcatacgcagattattctaataagagttacttgaaaatttaggaggattttgatggagacaattagtttcatcctaccaatctatggtactgaaaattcaattttagaggctgggttggaacgcttaaagttggcgaagacaacttcatttgaattcttactaataagtgatggcgctagagatgatttagtagcaatttgtagacgcttttcagaagaagacaagcgttttaagttgattgaacaagctaatcagggcgtatcggttgccagaaatacggggattaaagctgctaagggaacttggctgctttttgttgatccggatgacttattagcagagaaatttgaagaaatattgttagaaaaagcaagtactaacgcagatgttatcttttttggttttgatcgagtatatcaagacggtaaagttgaaaatagttttcctaaagataagctatttcccgctacaccggtatcaatggatgatttaattcgtgcaacgctttcggatggcgcttattataatggcatttatggatattttcttggaacaccatgggccaaaatgtttcgaaagtcttttttagaagctaatcaattattttacccagcaggaattattaagagagaagatgcgttatttagcattgaggttttcttgaagaaccctagaattaacattgttgattcgatactgtatcactatagaattgatcatgataattcaattagtaatagttaccgacaaggggttaaggaaagtttcattacagtttcgaatgatctgaacgatgatttagtagattggttacaacaatcagataacgcattatttttggattcttatatgttgagactctcgattgaactcttgtttgcagatttttgtaatctaagcaactctaagtcatatcaggaaagaaaaaatgagtttaagacttatctagaaacgcctgttgttagtaagcaaataaaaaatgcgagattagtcaatatgccaatgaaacagaaactattaggattactgattaagcagagaaatttctatttattaaattatttattgtttaaaagaaagcgtggataagaatttgaaagttgcagcagttattgtgacccataatcgtagggataaattagaaaaggcgattgatagtttattagagcagtccgcgccagttgaaaaaatagtggttgttgataatcaatcaactgatgatacgctagattttttgaaagcaaaagcgcgcgataacgcacaaattaaagtcattcattcagaagataatttgggtggcgcaggtggctttaatatggccttggcggcaactcttgagttgcctgaaattgattggattagtatcgctgacgatgatgcagtctatgatcaagattatatgaagaaaatggctgaacttagtgaaaaacatgccgatatcggttgttttacaggaactgttatcgaagatggtgaaattggaaccgaacatcgtgttaaaattgatgatttggaccggctacaattatctaaaattgacttaacgagctatgaaggtgattttccagttgatattgctacttttgtaggagtttttttgagaaaagatgtgctaaagaagattggcttaccggaaaagaatttctttatttggtatgatgacattgaatactcacttcgtattcgcaaggaaacagaaatgatcaataatatccaagctaagatttatcatctaacagataataatagtgtcggagcaagtggtgttaatcgtccaattggctggaaggactactatggttatcgtaatcgttggcaaactatgaagttacattgtgagaaccaacaaattctagctaagcaattacggtatgaacatttcagatatgcaatgggtgcctttttaaagaaaaaaggccaatattctagatttgctgccgtcaaactagttaatacagcctacaaggattttaaaaatgaaaaaatgggtaagaatgatgcattcttaccgttttaaatgaaagatttggtgagacagagtgactaatatttctgtttgcatggcaacttataatggtgtcaaaaccttacccaaacagataaaatcaattatcaagcaattaaccgcgcaagatgaaattgtgattatcgatgattgttcatcggatgatacaatggggttactgagggagttgttggtcaattttaacgggcaaacaattctgaaaagaaacgatcagaatatgggaccaattaaatcgtttgagaaagcactaggacttgcgacaggcaatcttgtttttctttctgaccaagacgatgaatggcatgatgataaagtggaaattattcaagatgcttatgtaaatgggcacgctgatttaattgtccatgatgcaactgttattggaaagaatggagaggttgttgatcagtcatggaatcactacaaccataaccaagttgaccaaagtgtatttagtaatttaattaaaaatggttatactggtgccatgatggctatttcgagacgattattagatgccgcgttgccttttccagaaaaaatcgaaatgcatgatcagtggctgtttcttgttgctaaaaagaatcattttaaaattacggcgacttctgctactttaatggactatgttcgacacggtggtaatgtcactggcatgagtaagagaaacaaaaaagaaatgttgattggtcgcttaagaatgctgaatacttatttaaagatgaaggagtcctcaaaatgaaaggtattattctagcaggcggttctgggacacgtttgtatcccatcacacgcgctttatcaaaacaattgattccaatctatgacaaaccaatgatttactatccaatgtcagtgctcatgttggccgggattcaagatattatgattatctcaaccccaactgatacaccacggtttaaagaattatttggcaacggcaatgacttagggttaaacatcgaatacgccgttcaagaacaacccaatggtttggcagaggctttcgtgattggggcggacttcatcggcgatgattcagtatgcttaatcttaggtgacaacatctattatggtggtggcctttcagaaatgctccaaagagcgtgttcccaatcgatagacatggttgacaaaatccgtaaacgctatttagactaatatttattactgttatttgaataaatgctttcttatacacagcgatagcatttttaagggcaaatatattatctctttgtgatttagcgtaaaataaaactagatagaattatggattaaataggagtgttacttagatgacaattgaaactgattataagaacttaaagctatgcaaacatggactaccaacttgggatgcaatgttgccagttgcattatctgttgctagtaaacagtcatctgcgattagacgaaaagagttttcggaggcaattgtaaacagtttgcaattgcctgataatctacgccagttaaagtcagaaaaataccctgacgtcaatattatagatagtcgaacgacatttcctatttcagaattaacaattggtggtttaatagaacggccaaaaaggggattctatttaattacaccgttgggtaaacaattactcgagcaatacggcggtaagttaacttctgagataatccacaagctaccacaatttatccaacaccaagacgagttaaaacaaaaagggaatcttgaaaaaactgaagatagtcagtcgacggataattcagattcggttgaaccgatacaaactgtagaccctattgtaaaggactataatgacaccgttagtattgatttacttgatcgtattcgtaaaggaacgccatacttcttcgaaaaattagttgtcgaattactaagcgcaatgggttacaaaggaacaaacggtcaagcttttgtgacgcaaaagagtaatgatagcggtattgatggtattattaatcaggatgccttgggaactagtacggtttatattcaagctaaaaggtatcaagtgggaaacaacgttggtcgaaatgagatgcaggcattttttggggcgttgagtggttttggatcagaccgtggtgttttcataacaacctctaatttctcgaacggtgcaattgagtatgcaaagaaccagcatattgtattgattaatggcgtacggttgagcgacctgatgctgcaataccaagttggtgtgaatgttaagaagcaatatacaacatttgatatcgatgaagacttttttattgaagatgattaatcaatgaaatggagctgattttcaatgcgtaatccactgactaaatttgaatttgcaagtcatggttattttggcccgcatgaagtatatagtcttgatttagaaactggtttgatgattggcagaatggtaacgtatgaatttattcaccctgaagaaattaggtttcaattggatgcagatactatccgtcgggttcgtaatcgactttcaagattgcaacttccgaagtgggctgactattatattaacgagtctatcattgatggtgagcaatggtcagtaaccgcgacctatgcagacggaacagtgattgagtctggtggctctaatgattatccgcctcgctttgggacagttaaaaatttgtttaaaccagttcaacaacagtttttaaaagattagatgtgtaatgaataaagccttagggattagtttttcaagctaatccctaaggctttatttttatgagtgctttagttattctcgtagtatcttctccatcgtcttccccttagccagttcatccaccaacttatccagccagcgaattttttgcatcagtgggtcttcaatggcttcaacgcggacgccgcaaaccacgccggtgatgagaacgcaattcggattcatttgaggagcttcctcgaaaaacgtttggtaggggatgtcttttgcgagttgggcagcgagttcggtttgtgagtagccggttagccagcagataatctgattgacttcggcttgggtgcggtttttgcgttcggctttttggacgagcatggggtagattttggaaagagacatgttgaagatgctttgcatgggcatgagaaggcctccttggcagtttagataattaatatatagcatgtaatgaaaatgaatacaaaatttaggtctgagaaagagtgaagttatttttcactctttttcttttgccctatttcttttccgttactttcttgttataatcgataccagttgtccgtgttataatacagcggactaaatgttataacagaggagagtacagatgagtattggcgatattttaacgaagacgtttacgaacatggatattgtgagttcgatcacgtcgacagtgtttattattttattaggattctactgccgcaaacgcgagatcttcacggataaatttgggaagattctgtcaaaagtcgttttaacggttgctttaccagcattagcattcaactcattcatgcaggatattaatgggaagactttaaaagaaggcatcaacgttttagtttggggcttcttgatctatattattttaattttaatttcaaaaccgttatacttacgctttaagggtgatcaacaagatacattgcgcgtgttgaccatctttggttcaacaacgttcttcgggattccaattgttggagcagttttcggagctaaaggggttatgtatagctcaattttcaacattggttatcgcgtgttcttatactcatatgggtacatcaagatgagtggcttgaagatggaatcgaagaacttgaaaaacatgttcttaaatccaatcgtgatcgccacatttgcggggttaatcatctggttaatccaaggcgcattaccacaagtggcggttgctgggcattcagtggctttcttacgaattgatcaaacagcgccatggttgttcaaaccaatgacgtacttagctggcttatgttcaccattagcttggttagcaattgggacaacacttggcgaaatcagcttcaaagaagctgcttcggacaagacatcatggatttatagtattaacaaagtgattttagtacctgctttaaacatcgtgttattggccatcttaacaatgacccacattttaccagttagctatatcagtttggcaacgattgtcatcatgatggcaacgccaacggcaacggtcgccgctgcttacgcgattagttttgacaaggatgcggtcttagcatcgaacgcgtcattactatcaacggtcttagctgttgtgatgacgccagtctggttagtgattttagaagtgattaaccaaatcgggattttctaggaagagggaaattaaatgtttaaaattgcttgttacggcgttcgtccgaatgaagtggcgacgttcaataaatataacaactacgattatgatttaacgttaattgaagacttattgacgcacgacaatatcgaaacggctaaggggcatgacgcggtcttgttacgtgccaactgtaccgctgatgcgcaaaacttagcgaagttgaatgaatacgggattcgttacgtgtttacccggacagtcggttacggtcatatcgatttggctgcagcaggcaagtacaacatggaagttgctcgcgtgccagcctactcgccaaacgcgattgctgaattggcattgacgctagggatgtcattgttgcgtcacaccacttacacaacgaatcggacagcccatcatgatttccgtgtgagcccagtgatgttcagtaaagaagtccgcaactgtacggttgggattatcgggactggcaagattggctacaccgaagcgaagttatacaaaggcttaggtgccaaggttgtgggttatgacttatatccatcagaaatcgctaaggaagtgcttgattttgtcagcttggatgaattattagcccaaagtgacattgtcagcttgcacattccatacttcgctggtcaaaacgaccaattcatcaatgcggacttaatcgcaaagatgaagaacgatgcaatcttggtgaatacagcccgcggtcaattgcaagataaccgtgcgattatcgatgctttgaaagctgatcaacttggtgcattcgccgctgacgtgttaccagctgaaggcgaaatcttcttcaagcaattcccagcagatcaacctgtgccagatgcaaccacccaagaattgattgatttatacccccgtgtcttgttgacgccacacgttggttcaaatactgacgaagcgctcaagaacatggtcgagattagttttgaaaacttccatgaaatcttgacgacgggtaagacgcaaaatagcgtcgcaaccactgaaaattaaagcggttgtttgtattttcatgaaaaatatggtatattgttatcagtaattagatacttcagagcgagtgagcagaaatgctcactctttttattggagcacgtctaatctgaaatataaaaatgaattggagggaatcatttgagtaccgttgtggaaacagttcacgatctgatcgtgccgattcttgatcaacaccattttgaattagtggacattgaatttgttaaagaaggtagcagttggtatctgcgcgtcttcattgacaaaccaaatggcattgaccttgaagattgtgccttagtaaacgatgcgttaagtgagaaactggattcaatcgacccggatccaattccgcaggcttatttcttagatatttcatcacctggtgcagagcgtcctttaaagaaggaagccgatttccaaaaagcacttggcgaatacattcatatctcgttataccaagctgttgatggcgagaaaatctatcaaggtacactaaaagcccttgatgatgacactttaactttagtgattaaaattaaaacgcgtcaaaaagaagtaacgtttaatcgtaaggaaattgccaaagctcgcttagcaattgaattttagtaaaggtaggctagttacatgagcaaggaaatgttaggtgcacttgatgcgctagaacaagaaaaaggcgttaaaaaagagattgttattgaagcccttgaagcagcacttgtttctgcttataagcggaattacggtcaagcacaaaacgtggaagttgaattcgatcaaaagaagggtaacatccacgtctatgctgtcaaagaagtcactgaagaagtgtttgattcacggcttgaagtgagctaccaagatgctttggaaattaacaaggcatacgaagtgggcgatacaattcgttttgaagtcacaccaaaagacttcggccgaattgcagcccaaactgctaaacaagtgattatgcaacgggttcgtgaagctgaaagaagtatcatttacaatgaatacagtcaatacgaaaacgaaattatgcaaggggtcgttgaacgccgcgataacaagttcatctatgtcaacttaggcaagatcgaagctgttttaagcaagcaagaccaaattccaaacgaggaataccaagcacatgatcggattaaggtttacgtttcaaaagtggaaaacacaactaaaggcccacaagtctttgttagtcggacacaccctgatttagtgaaacgtttattcgaacaagaagttccagaaatttatgacggcaccgttgaaattgtctcaatcgctcgcgaagctggcgatcggacaaagatggctgttcgttcaacagaccccaacgtcgacccagtcggcacctgtgttgggcctaagggacaacgggttcaactagttgttaatgaattacacggcgaaaacatggacattgtgaagtgggaagaagatccttcagactacatcgccaatgccttgaatcctgccgaagtcatcgctgttcaatttaacggtgataacgaacatacatgtacagtcatcgtccctgattatcaattgtcattggcaattggtaaaaaaggtcaaaatgcacggttagctgcgaagctaacgggccacaagattgacatcaaacctgaatctgaagtcgaattcgttgatgaagacgacagtcaagatgaaggtgcagtcgttgaaggttttgaagaagaaacaacagaagctgttgaaggcttcgaagaccaagcaacggattctgctgttgattctgaagaacaaccacaagaataagtgaggtgttcatgatgaaacaaagaaaagtaccaatgagaaaagacgttatttcgcaagaaatgaagcctaaaaaagaaatggtgcggattgtaaagactgccgaaggtgagattagtattgacccaactggtaagaaatcaggtcgtggcgcttatgtttcactagaacctgatgcaatcaagaccgcccaaagcaagaaaattttagaaaagacgtttgggattgacgttgcagaatcattttatacagaattattcgaatatgttgatcatcaaaaggctcggctagaattatttggagaacgaaaatgagtgaacaaccagaccgtttattacaactcttaggtatttgcatgagagcacggcaactggtcagtggtgaagaacaagtcctaaaagccattcagcagcaaaaagcgaaattggtttttatcggctcagacattagccaactgacacagaagaaattgactgataagagtcatttctacgaaatcccggaaacaaaagcgtataccgcggcccagctaacccaagcaattggattacatagagccaccatcgcggttgttgatgccgggtttgccaaaaagatgataacgctactgggataataaaggagcgtgaagatatgggtaaaaaacgtatctatgaattagcaaaagaaattaacgttgccagcaaagatcttttagaaactgccgttaaaaaaggttacgatctaaaaaatcacatggcaactatcgatgacaatcaagaaaaagctttgagagccatcttccataaggaaacaaaaccagctgcaacgacaactgacagcaagccagccggtgcagcacctgctgcaccaaaggcaagcgaaaaaacagataacggtaagattaagattaacaaagccgctatccgtcgtcgtccagaagctagcagcaaaccagcacctcgttcaaacaaccaacgcccacaaggcaaccggaatggccaagcagcaaatggtcaaaaccgcaacaatgccaatggtcgtcctaacaacaataacgcccgtcctaataatggtcgccctaacaataatgcggctaaccggacaaacggcaatacgcgtccagctgggtcaaaccaaccattgagcttgcaagaacaaatctcacaagctaatgcacgtcgtcaaagaacgcaagaacgcattcaacaacaacgtgaacaacgcgaagcagacgaaaagaaacgccgtcaacaaagtaaccgcccacggccagctgctaaaccaaacggtaataacagcagtcgtccagccggcaacaagccagccggcgcacgcccaacgacgacaaataatcgtcctgcaaacagcaacaacaacggccgtccagcaaacaatacaaacagccgtcctaataacaactcgaaccaaagtcggccagtttcggcacaagaaatgcaacaaaaaatgcaagctaatacggtgagtgctgctaaaccagcatcaaacaatacagcaagcaagccaaagaactttggtccagataagaaacgtggcggcgggtataacagctacggtaacaatcaacaacgtttcaataagaaacgtaagaagacccgtaagcaacaattagctgaacaaaatgctgctaagaaggaaatgccacaacgtaaagaacggccattaccagaagtattagtttactctgaaggcatgaacgttgcggacatcgctaagaagattcaccgtgaaccagctgaaattatcaagaagttattcatgttagggattatggttaacatgaaccaatcacttgataaggatacaatcgaattattagcaacggattacggcatcgaagcagaacaaaaagtggaagtggatattgctgatatcgattcagtatttgaaacagaagctaagagtgatgccaaccttgtgagccgtccaccagttgtcacaatcatgggtcacgttgatcatggtaagacaaccttattggataacttacgtaacagtcacgtgactgatggtgaagccggtgggattacgcaacatatcggtgcttaccaaacgaagttaaacgatcgtttaatcacattcttagatacacctggacatgcggccttcagtaacatgcgtgcgcgtggtgctgatatcactgatatcatcatcttagttgttgctgctgatgacggtgtgatgccacaaacaatcgaagccatcaaccatgccaaggctgctaaagccccaatcatcgttgcggtgaataagattgataaaccaggcgcaaacccagatcacgtcatggaacaattgatgggttacggccttgttcctgaagactggggtggcgataccatctttgttaagatctcagctaagactggtgaaaacattgatgaattacttgaaatggtgcttcttgaagccgacgtgcttgaattgaaggctaacccagatcaaaaagcagttgggacagttatcgaagcccgtcttgataagggtaaaggacctgttgcatcactcttgatccaacaagggacattgaagattggtgatccaatcgttgttgggaatacctttggtcgtgtccgtgtcatgacaaatgatcgcggtcgtcgtgtgaaggaagtcttcccatcagaaccagttgaaattactgggttaaatgatgtgccacaagcagctgaccgttttgttgtctttgaagacgaaaaaacagctcgtgctgctggtgaagaacgtgccaaacgtgcgctcttgaaggaacgtagccgttcaaaccctgtcacattagataacttgttcgaaactatgaaacaaggcgaattaaaagaagttggcgttattatcaaagccgacgtacaaggttcaacagaagccttggctggtagtttacggaagattgaagtcgaaggcgtgcgcgtgaatattattcatgaagccgttggtgcgattaacgaaagtgacgtcacattagctgctgcaagtaacgccatcatcatcgggttcaatgttcgcccaacaccacaagctaagattcaagccgatgctgaacaagttgatattcgtttacaccgaatcatctacaaggcaatcgaagaaatcgaagctgctatgaagggtatgttagaaccagtttacgaagaaaaagtaacgggtcaattaactgttcgtgaaacatacaatgtttctaagatcgggacaattgccggttgtatcgttgacactggcgttatccaacgtgatagtggtgtccgcttaattcgtgacggtatcgtgatttatgaaggtaaactttcaagcttgaaacgtttcaaagatgacgttaaagaagtcaaaactggctttgaatgtggtgtgacaatcgaagattacaatgatattaagattgatgatcaaattgaagcctacgtgatggaagaagtacctgttaaataattaatttacaggaggacaagcaatgaaacatcgtgttggtcgggttgaacaagaaattcaacgcgaaataaatgacatattattaaaaagagtgcgtgatccccgagttgaaggggtcacaatcactgatattaatctcagtggtgacttacaacatgttaaagtttattacagcattttatctggcttagcaagtgacgctgaaaagacacaagctggcttagataaagctaaaggattgattcgcagcgaacttggccaacggattaagttgtacaagattccagaaatcacctttgaacaagacggttcagtgcgttatggtgaacatatcgacgaacttttacgtaagttacacgaagatgaagcacagcgttaaactgtgaaaaagagccccgcgaaagcggggctctttttttgtttgaatgaccttatggaaacgataatctattaaattgacttagtcatttgcaccatattactattctttcaaaagttgattaaatatcgaccgttaaaatatatcgtccaacgctatcggcggcgaattgataagcgttatacagaggccttatcagtttctaatcgctggttgcggttttattatcatcaacgagaaatatcccacattattccacagattctttattatttagaggctaatccggcactagaaacgattgatgatgcgattgcttatattgatagtcagccggttagtttagagctgtatcaaaataacttaagcgagtttcgtaaataggttaagcagtttaatacaatggtgctgagtacagcgaacaacctgggacaaccgtctagtcgacagattaattttgtcacgcttgatgggataccgaatgtctggtattttggcaccgaccccgaagcgtcgaaagtcagtgaactcgatttggggcgagccgcaatttttacgctaccgactagtgaagaattgtgaatcacgagtaaccggctcaaggtataccgaactcagtatcgttttagtgatatagcagaggcctatcaaaaacaagtaccaggctatgttgagagtttatccaaagaagaacaggaaaaagagattatttttgcgatcgaattaaaaagtgctaggatcgatagtcggtttcaaaataaaggactcactttttctgagtaaaaaaagttactaataaaaataaagtgcgtttgtggcggttaacttctgagtatagcctaatcaggcgaattaccaacaaagttggtgatttgactgatgtagctaaccggaagaagatggcttatggcgcacgttttagcgggtcgttattatccagagatggaaagtagcgacccgttttttgcgttcagacgtgcatttaagcggaaggtcggctagaatgaaattatcaaaacatgtttagagggttaacgcatgaatgtcaaaaaacaatctataatgatgcgcttagcgcaacattttaaccgattccaatccgcggcggtctatcagattatgcagcgaagtttaacgttgttatttccatttgtcttgattgggagtatcagccaactcatccagctagcactttttaaccggaatagttttgttgtgaatgtatttcatctttcgaattggttgagtaaacggaatatctttcagatgatgtttgacagcattacgagtttgacgttaggaatcgttgcggcattagcagcgatgtgtgcggcgcgctatacagccaaacactataagcgtgatgaacaattagccagcattacggggctcattgcctatttaatcttagcgttacggttgacgccaaatgagggcttatctttcaatagccagatgttgggaatggggggcttattttttggcctattagtcggctatctgactggattagccttcaaaaaattaggacgacctcatcggcgtgatttaccgctgaatgggtcagcagtaggacgttcattggattctatgtgggcgattttattggtgctcggcgtcattttagggctgagtatcctgctaaattggttggcgatttcaatcttgccagatcaagtcatcttacgattacaatcactaaaagcaaatcaaacgggtctgcttttcacgttggggactggtttagcggccactagcttaactttttttggattaacgagtatgccaacattggcccaatttgggcgtgagggaatcgcatcttcggccaacttaaactatgcgtttagtcatcacacggcttggcacgttccatatccgttcacgttagggactttgtatgaaccctttggtgcgattggcgggacgggtgggacattagccttagtgattgccgttttcatcttcagcaaacaaagggattatcatttgattggtcgatggtcgctgttgcccgttttatttaactttaatagcgcggtccttgtgggaatgcctgtcattggaaatggcttgtatgtgattccattcttattggtaccactggtaaatatggggattgcatcggcagcagttgcattgaatctcatgccgtcggtagtcttcacggttccacttgggacccccggcttattgcaagcgttcatgggcaccaacggtgatttagtcgcgctggcggtgacggtattaaacgttgtcgtcggcgtgatgatctacaagccgtttgtccaattggcagatcaattagcactcgtaaaggaggcggcataaattggccaaattaagaaaaaaaagcctctggttgttagtcattagtttggccttgatcggcggattaatgtggccagctgctcaatggagtcgccagagcgtgatgaccttagctaagcgccatgattcacgaatgtcaccggtaatttttattccagggagtagtgcaacccaaaatcggtttgatgaattagtggctaaattgaacgctaaccgcgggaatcggcacagcttgttaaaactaactgtgcatgaaaataatcagattagctattcaggggaaattaaaccgcgggataatgaaccgtttatcgtggttggttttgaaaacaataaggacggttatagtaatattcaaaagcaagctaaatggttttcgctcgcatttaccgcgttgactaagaagtatcaatttaataactttaaagcggttggccattctaatggcggcttaatttatacagcttttttggaagattattttaatcgcgatgatattacagtgaagaagttgatgacgattggttcgccgtataacttttccgaaacatcgattacgcataagtcacagatgctgacggatttcattaagaaacgtaaaaatattccgacgaacttatcgatgtattcaattgcgggaacggaaaactttgaaaatgatgggattgtacccgcgcgtagtgtagaggcggggaagtacatttatcaagggcaagtcaagcactacaccgaaattacggtgacaggtgaccaagcacaacactctgatctaccacagaatcaacagattgtggccttgttagaacaatacattctcagcaaaaagaacacccgcaatacacaaccaacacctaaggattcaacaccttcagaggaccaataaaaaaagccccagaataacagtaaggttgttattctggggccttttttattggcattcattaattagaatgcttggtactttctttttgaactagagcaccaattgctggcaaattacccaagctatcgattgacttatttggcaagacaatggtgttattttgaccgtctgcgatgtgttccatcgcttcaatattcttatattgaagatagagttcgccgttattgactaagctggcattgatcaaattaatttgatctttaacagcttcggcaattgttcgttcactttgagctttcccttcagcttccaaaatttgtgtttgtttattggcttcggcttctagaatattcgcttcttttaacccttcagctttacgaattgcggcggctttgagcccttcggcttccataatgttggcttctttttcacgcgaagcacggagcaatttattcattgattcttggatgtcgtgggccacttgaattgaatcgatattgacccgatcaacgtttaagccgtagccggctgttacttcgctaagttgttcaaaaagggtttggttaattttttcggtgccatttaaaacatcgttcaagtccatgttcccaataatcccacgtaattgtgcacgggtgtcttggaccatacttagaacggaatctttatttttataaacgtacgcattgacgtcagtgatgtgatatttaatcgtttccgaaatcataacaaccacgttgtctttggtaatgacttcttgttcagcgacttttaaggggatttgtttcatattaacgatttctgtgatgtgataaatgaatggaatgaccaaatggaaaccaggatcaagcgttttaacgtagacccctaagcgttccaaaatcccaacttccccggtatgaatcaaagcaaatgatgaaaagagggtgactgcaacaatcactaaaacaagaatgactaaaatactgatgaaaatacccataataaaaactcccttttgtctggcttaatacgtcagaatattgtggtgcgctgtcacgattaaagctaaaggtgtgacggccgttaccatgacgagtaagccagcgctagctggtccttcgacacggtaatgatataagatgccaaaaaaattaacggtgccggttgatttagcatcctgtaaagtaaacgttaaccccactaagcgttcatctaacatattccgcctccctttgttcacattgtatctgattaccaataaaaggcaactctaagtgacagtaacgaacaaaattgttaggtggcttgtctcgaatgcatgaagatagtaaactaagcgtactaaggctggaaatggaggaaccgtggatgagacgaaaagtgacaccgatttttcaagacagtttccaaaagcgctattggcgacaaataattatcggcattatcgcggtagctctgtgtcttggtggtgctatctggtggttgaaacaccgttcggatcgaccaagcgcgacgcaatatccgattctagggatgcaattaagtcagtcagatggttaccaagattttgacgggttaaaaaaggacggtattcagtttgtttatttaaaagcaactgaaggggccagttacaaggatgataatttcgacaccaattacagtcgagcaagtggcactggcttacgcgtgggcatctttcatttttttagttttgatagttcgcctgaacgccaagctgaccaactttttaaagcagttggcagccagacgggtgatttaccaattatgatctatttggattattataacgactatgcacaacaaccgcccgcacaaaagaaaacgcaaatggcactggcgcagctagtgaccttgattaatcaacattatcatcaaaattgtctcattggtggtgcacccagcttattaaaacggtatgtgccacacaaaggagactatccattgtggcaaactacgcgggaacagccaacattggcgactaagaacgggttctggcaatacacaatggctagtcagattccaaacagtgataatcagacgaactatcagttagcagtttttactggcaccaagcaacaatggcagactattaaatagaaacggagagaaaataatgattaaacacaaaggctggttattattaatcgcaatcgtggtggttttcatcggtggtagttggggaattcatagctattattacggtggggaagcctactatacacagattgtttcaaacggaacacgaatggaagaaaaggattcagcaggggaaacggttatcgattataactatcaacaagcagcctacaatgaagatggtgttaccaaaaaagttgattttaatggtaataaatcaacgccgcttaaacgaaatgcgtacctcaaattaatcgtcaataaaaataagggtgtggtttcatgggaaaaggttgccaaaaacgaagtcccagataaagctcaaaaaatgttgaacaaataaagaataactaaaaaggcccataacgctgagcattatgggccttttttaatagctattcgattggataatccatatcttcggcttcatcgtaaattgaaacgggccgttgattttcacaagtaatttttaattgatagccgtagtgatcgagaaagaccaattcgttttccgtgagggaaatgacttgaccactcaatggcttatgatcgatttgcaccaacaagttcggagtaatttctaatgtgtgtttttttcgggtttggttgtcattaaaagaccagtgtccagcataaaaagtcgctactttactcgcttgagtcgtccgaactttttgctgatactggtgaatggtttgatttaaaattgcttgtggtttttgaaatttaaaaaatcgcataagtcacaccccaacttactattattctaccacgaaatagttagtttgcggacaattaattatcggacttacgactgtttttttaaggaatggttaaagaagtgaatagtggcggaattcttatcagtagaaaaacttttcgataggcttctagatctaaatcccgtatactggcagtattaaataagggagctgattataatgcaaacacttgggattattgggactaactggattacgggacaatttgttgatgcggcccgggaatctgaatcatttaagttaacagctgtttattcacggacggcagataaagccgaccaatttaaaacgaagtatcacgcaccagaagccacaagttacactgacttagacgggtttatgaatgccaatgaatttgaaaccgtctacattgcatcacctaatagtctgcactttgaacaagcgaagcaagcaattttagcgggtaaaaatgtcatcgtggaaaaacctgccttcagtaatccggctgaaatggcagccatgcaaacattattaaagcaacatccagaccaattcttattcgaagcagcacgtcatattcatgaggccaactttaagattgtacaacaagccatcaacgcattaccggcgatcaatggcgcgaccttgagctatatgaaatattcatcacgctatgacgctgttttagcgggtgaagaaccgaatattttctcaccacatttttctggaggagctttacaagatctcggcgtgtatgtcgtctatgatgccgtcagctggtttggtgtgcccgattcagtcgattatcaagctgaattgttaccaactggagtggatggtaaaggggtcgcaacactgcgttatccaacctttaacgtcacgttgatttttggcaaaaccgttgattcctatctaacgtctgaaatttatggtggccaaacgacgattgtcctcgataatgccggcacaatcggcagtgttgaccgctacagcgaaggtgggcaaaagattgagtcactaggggaacaatcacttgctaatccaatggttgctgaggcagaaaatttcgcggcgatgattgctaatcgtgacacaaaacggtatcatgaattattacagctaagtgaatcggtcaaccaagttttatatcaattaagacagtcggccggaataacatttgatgcagattaacatgacggaggcaatacatgagcgtttcaccactatttcaagcactatgggatgagcaaggatttacagaaatgtcacccatccaagaggcagtttatcaaccactgaaaaaagaccaatcaattctaggactggcacccacgggttctgggaaaaccctcgcgttttcattgccgttattagaaaaaattatgccgggcgaagggctacaagtcttaattttggccccttcacaggaattggtgatccaaacacgggacgtcattcaaccttatgccaaggcaatcgactgtaatgtccaagcgattacggggaaggcgaatgttaaacgccaaatcgaacggcttaaggccaaaccagagattatcgtggcaacgactggtcggttattagaattgagcgaacaacggaaagtgaaattccatacactccaagcgattattatggacgaagctgacgaattattgacggatagcgggctttcagaaacccgccatatcgtgcaagaatcacctgccgatgtgcaacttggcttcttttcagcgacatcaaccgatatcttattagagttggaaacatggttcggcgtgccaatcgaaacaatcgacgtgcgtgggattgataagacgggtggggaagtgttgcatgcatttatcccaactggtaacgctcaaaaagtgaacgtcttacgccatttagcacatcaaaagaattttagaggattggtcatttttaaccaatccgcgcaactcttacaagctgcacaaacgttaaaacatcaaaaagtaacgtatgccgcactctcagggcaaggtcgccaaacagaacgccaaaaagcgctcaaagatttccgtgaaggtaagattcaactcttactagcaacggacgtggctggccgtggcttggatatcaccgacttaccttatgtgattaattttgatgtaccaaacgcaaaaatcacttacattcatcgtgctggtcggactggtcggatgggacgcacggggactgttttgacgttgggcaatcaacacgatgggcggaatttgcgtaagttattggcgcctgaatatgatcttgtgacccgttatttggttggtgatcatttggaagccgaaaaaccagtgacgcctaaagtagcaccagttgctgcaacgaaagcaacatctgctgtaccaactactggtgaagcaacagaaggacaagtgcaaaaggctacgccgacgacaagcgcgcgcaaagccaaattagtaccagttcgccaacagccagctgcaccattaaaaccaaaacataagaaaaaccgtaaacgaaatcaaaagaataagggctaccataagaaaaataatgactagtggtctaatctagattgagcgagaaaccttaacaacctgttaaggtttcttttttttggactagtccgtttgtgaaaaggttatcagtaattaattgacaaatctcaggaagcgattacaatataagtaagggttttctttcgcttcgtaaaatgcgatagtggcgaactctcacaatcaggaactaatttttgaaagccttttaatggattggttagtcattctcgaagaaatatctagaccaattaatgaatggttacgaaagtggttcacgatgagatgatcataggaggtgccatactatggcagaagaacagaacttagaagcaatcatgggcttaattatcaacggtgggaacgccaagagtagctcaatggaagcaatcatggccgctaagaaaggtgacttcgaaacagcagctgccaaacttgcagaagcggatgctgctttatcagaagcccataattcacaaacagatatgttaaccaaagaagcaagtggcgatcacatgcaagtgacattattgacggttcactcacaagatcacttgatgaacgcaattactttccgcgatttagcaggcgaagtcgttgacgtttacaagaagatggccggtgtaccagtcgattaaagtttggctaatgaacaaaagggctaggacaaaatgacttttgttcgagccctttttagttaaaagcaacaaatggcacattgaagagaagagtgggaacgggatggaaattaaattaaatttaaaaataccagctagttatttttatcagaagattctggaatcagtgttgtttgatattaagcaacaaactggggataaactaactgaagcgcagttgcctaattattcgtacgacaagcaatttggcaagaatcgggcgacactgaagattacgcaactgattaaagatcagagttatcactacgaaacgacttctacccaggggagctatcaatcaagttacgatattttcgcgaatggaccgcagtctattgaagttatctatcgcgaaaatgccaaagtaaatggcaaattacaacaaaccaatgatatattgatggcctttgtcatgggtttcatgcgtaaacgcggctttaagaaaatgttgaaacaaatcgaaaaagcatatcaagcagaacaataagcaatgactttgagagaaagtaggatgaccagtaatggaataccatcaattagcaccatttcctaaagattttttgtggggttcagcttctgcagcctatcaaattgaaggggcctaccaagaagatggtaagggccggtctgtgtgggatgaatttgtccgcattccaggcaaaacgttcaaagccacgaatggtgatgtagcggtggatcactatcaccgtttcgaagaagacgtggcgctaatggcacgcgctgggctcaaagcctatcgtttttcgatttcatggccacgggtcttaccaaatggtaaaggcgctgtgaatgaggcgggcttagccttttatgatcgtttaattaatacattaattgccaatgatattgaaccaatcgtgacgatttatcattgggacttaccgcaagcgttgcaagccgaatatggcggttgggaatcgcgtcaaattattgaagattttaccaactacgcaggcttattgttcgaacgcttcggcgatcgtgtgcaacattgggttaccttgaacgaacaaaatgtcttcatcactcacggctatttaacagcggagcatccgccagcagtgactgatgctaagcgaacttatcaagctaatcatatggcaaaccttgccaatgctagtgcgattaaattattccatgaaaaaggctatcaagggggcatcggacctagttttgcctacagcccaacttatgcgctgaatgcggacccagaaaatcaaattgcggctgataatgccgaacaaattaacgctgatttgtggatggacgtttatgcttggggccgttatccgaaattagtgatgacttatctcgaacgaaacgggattgcacccgaaattactgaagcggaccaagctttattagccgatccactcgcacatcccgattttatggggttgaattactatcagacgatgacggttacgactaatccattagaaggtggcgttggcttgaccaagcaaaatacttccggtaaaaagggcactagccaagcaagtgggttgccaggcgtctataagaccgctgataacccctatatgcaacaaactgactgggattggaatattgaccccgaaggacttcgaatcgcactcagacgtattgagagccgttatggactgccggtcttaattactgagaacggtttaggggcttatgacaccttgaaagaaggcgggcaagtgcacgacgactaccggattgcctttttaaaggcgcacgttcaagccatccacgaagctattaccgatggcgtttcggtcatcggttacacgacatggagcttcacagatttattaagttggacaaacggctatcaaaaacgctatggcttcgtctacgtggatcgcgacgaaacagaagaaagagaactaaaccgctatccaaaagacagtttctactggtaccaaaaagtcattaaaagcaacggggaaatactatagagtgcgcagtcgaacgggttggctttgaggattaacagaaaaatacatattatggcgggtttaagccatagtatgtatttttaggttaaccggaaaaggcagttcgaagcagcacgtttaaaacaagagtgcgcagtcgaacgggttggctttgaggatttgggtgataggacatccagtctttttgggccaaaggccttataacgttgaacccacgagacaactagtgagttattcttaataccatattttctcgctattaatttataacctaagggtgacgttagataatcctgaacaacttttatttttaatgttttagaatatttggtccaatatcgggggttcacttcataaggtgatttttttaattaagtgcaaccaagctgataatcaaaatatgaaatggatgacaacagcttttttaggctaaaagtcgtataatgacagtattctaaatgaaattggagatcataatatggcagaattgatgcgtttttatcaaagctttcaaccggaacattatcaagtttttctagatattaatcgggctcaaaaacaatttagtggtcggacgacaattacggggactgctaaagaagcacttgttttaattcatcagaacggtttagtgattgaaacagtgacggctgcaggtaagagtgtgccgtttacagttgataatgacgcaaatgccttgaaagtcgaagtcggccaacctggcgaagtgactttggtaattgcctatactgccgctttaacggattcaatgatgggcatctatccttcttattatcaagtcgatggggtgcaaaaagaattaatcggcacgcaatttgaaaccaattttgcgcggcaagctttcccatgtattgatgaaccagaagccaaagcgacttttgatttagcgattaaattcgatgagcacgaaggcgaaacgattctgagcaacatgcctgaaaaagaagtcatcgatggcgttcaccactttgaaacaacggtccggatgtcaacgtaccttgtggcctttgcttttggtgaattgcaaggggttcaaaccaaaacggagagcggcgtgcaagttggcgtctttgctactaaggcacatcaagcaaacgagctcgattttgcattggacattgctaaacggtcaatcgaattctttgaagacttctaccaaacaccctatccattaccccattcatggcagttggcattgccagacttttcggccggcgcgatggaaaactggggcttagtcacttatcgggaagcttatttattactcgatcctgataatactgccttggatacgaaacaccgcgttgcgactgtgattgcgcatgaattagcacaccaatggtttggtgatttagtaacgatgcaatggtgggacgatctttggttgaacgaaagttttgccaatatgatggaatacgtcgcaatcgatgcgttgcagccggactggcatatttgggaaagtttccaaacctcggaagcagcggcagccttacaacgtgacgcgactgatggggtccaatcggtgcatgtgcaagtcaataatccagccgaaatcgatgcgttatttgatggcgcaatcgtgtatgccaaaggcgcccggatgctcgtgatggttcgcgctttaatcggtgacgatgctctacgcgctggtttgaaagcttattttgcagcacatcaattcggaaatgcgactggcgctgacttgtgggcagcactggggaaagccgctaacttagatgttggggccattatgcattcatggctcgaacaaccaggttatccagtggtaacggccaaagtcgttgacggacaattaacgcttaaccaacaacaattctttatcggtgagggtcaagaagttgggcgtcaatggcagattccattgaagagcaactatgcggcagccccattattgatgactgaccgtgaattggtactcggtgattatgctcaattacgcgccgacaatgggcaaccattccgcttaaacgtggggaacgaatcgcatttcattgttcattacgatcaaacattattagatgatattttaaatagtagtgctgacatggcaccaattggacaactgcaactactgcaagacttacgcttattagctgaaggacgtcaaatttcgtacgcagatgttgtgcctgttttagcaccttttgccaagagtgattcaaatgtcgtggcagatgccctttacacggttgctggtaacttgaagaaatttgtgacacctggtgaagaaagtgaacaacacctacgtcgattcttcgaccaattgagtaaagcgcaagttgcacgcttaggttggctggttcaaccgactgatagcaatgacgatcagttaatgcgcccaactgttttaagcgcagccttgtatgctaaaaaccaagcagccattgatgtagcccatactttattccaagcgaaccaagaaaaactggtcaccttaccagccgcaattcgggtactggtcttgatgaatgaggtccaaaacttcgggaatgccgcactttatgatcagctcttagcagcttatcgccaaacgagtgatgcgagctataagaatgatttgactgcggccttaacgcgcacgactgatcctgaattaattgcgaccttaattggaaaatttgaagatgccagcaccatcaaaccacaagatttgcgggcttggttccgcggattactcgccaacgacaagagccaacaagcaacctgggattggattcgcaacgattggcaatggctagaagagacagtcggcggtgatatggaatttacaacgtatatcacctcgattgccgcaatctttaagaccccagaacggttggcagagttcaaagccttctttgaacctaaactcaacaccccaggcttaacccgggaaattacgatggacattaaagtcatcgaaagtcgggttgcattgattgaagatcaaaaagcagcggttaatgaaacaattgccaaacatatgtagtcgaacgttgtgcaagttaaattcaatttgaggggttttgagatgacgattaaattagtcgcgattgatattgatgatacattattgagttcacagcaccaactgctagccagtacgaaacaacaagttgctaaggccctggaacagggtgtgaaagtcgttttgtgttccggacgcccattagctggcgtggtgccctttttaaatcaactagggattgccggtgataatcaatacgtgattacgtttaatggcagtattatcgaaacggcgtctggtaaaatcttgaaagaagctggcatcagccgagaaacctaccaagcgattgatgactactcgcaagcaacgggcttaccgtataatgtgctcgatcaaaatagtgtgatttatacgagtaatgtgaatgttgcaccaatgacggtggtgcaagcttgggaaaacgaagctggtattcatattcgcaaaccgaatgaaatcgacgcggccacgcagatggtcaaagcggtctttacagggaccagcgaacagttagatgtacatgaaccacaggtacacgcgcaatttggaactgataattatgttgttcgtgcggctgacctctttttagaagtgatgcacgctgatgttaataaaggcaaagcagtgcaatacctcgcgaataaacttggattcgcgccggatgaaatcatggcgattggcgatgagaaaaatgacatcccaatgttccaatttgccggtactgcggtggcaatgggcaacggttcagctgaagcaaaggcgcacgttgactttattactgctgataacgattcggacgggatcgcccaagcatttgatcaatttatttttaaagtataatcaaaaagcccctgacttttgtcaggggctttttcttcgatatgtacaagctttccaacacgaatatgattttgttcaacaaaggattaatgctggctatatcaatcaatcgattgcaggcgttttgtataccgaaattaatcaagcacagttattgcaactccaacaattccaaggaacggaaactcgagttgcaaaagctaaagcccttctattggggttcgttattaattgatggctttattttagtgattttaatgggtcgcttttatcaattaccattcctgaaaactgatccgtttttagtaatggtgattttgctaatcgaagtagctaatctctacatgatgttgacggttcgtaaccgtcaacaacagttaggaattcaaggtatatcacagaagtcgattatgatgtatgtattcggtggattaattgttctgttaattgttggattggcactactctcaagtcaatggggcgcaattggcgttattagtgggggcgttgttggtgggattgtcatgcgggttcgacaacgccgctcgaagaatagctaaataagtgcctcaaatacattagttgtgcctgcgttttggagtctgttagtgacattaataggggtaattagcttggtcaaacgaaataaaaaagcttaattaaagaaaaaagcgcggtagatttgtaaaaatctaccgcgcttttttggattaagcaaacattttcttagttgcgcgcatcaatgtcttgatgtcacgatcataacgtggtgtatcgactaacttggccattggaatgccagcgaagtgataagctgcaatttcgccagaacgaacagcactttgttcagtgaaaatcatctgataaggttgttcaacgaattcaccagtgaaggctaagttggttgaatgttcggggatgacttctggacggtcagttttggcacgattattaaagagtgctgaagcatatggcatatagacaggaatgttattgatgacactgtccataatttcagcttctttttcacgaatattgattgggccaggatcaacttttgatagttggccaattaattcttgaagcatttccttacccgtcatttcgatgtaaggtttatccacaaattcaccgttacgacgtgggtagaggaagtaaccccagataaccgcttcgtttggtttttgcgttgtgaagtgtggttgatggtgaacaacaatcgacatattcacatctttttgaccaagtggtgtgattggtttcgttgataggaacgaattcaaagcattcccaggaatttgcgttgtaatccgttcgatttcgtttaacaaaatatgattcttagtcgttaaagtgaagctgacccactcactggcattgcggtcagcgaagaatttatcgggattgccaagattatagaatttagaagcgacttgtttccacagaccggcagcagcaccataatccatgttttcagctgctggtgtattataatcgccaagtgttgcggaatcggtaattgacccgtttgtgaagatgaccgctgtgtcgtcgtccaccgtaacgtgttcaacttcatctgtctcagtattagtcattgtcataccagtaaccgtaatttcatcggtcatctgagtctctttaaagtctaagtcagtaatccgtcgattgaggataatgtgacaaccttgcgcttttaagtagttaatcagcggcagcatgatactttcgtactgattgtaacgtgtccggttaacaccgactaagtgttcaatctgagtgaattcataaatcatttggtgcatgtaacggcgtaattcttgtgcggaactttgggttctgaaagcaaaggtggtttcccacatgtaccagaagtttgtttggaacatatgtggatcgtccttgaagtattcggcaattgaaacgttgtctaatttttcttcttcagaatcgggcatcataatcaatttggtcattaataaccgatccttattattaaagccgagatgaccagcatccaaaatacctttactaccttctaataaacgtgctttgtcgaatgtgcggtgttgagcatcgaatgaacgggtatcttcttcagccgtcatattgggttcagttgctgaaggaatccgacctagaagatccattaaatcgacataagtccgatagttaagcatccgcccaccacgtgcaacgtagcccttagtattttcgagaggatggtttttattccaatattcatcggttgtttcggaaactgatgccccatcgtttgaaccatggtcatctaatgaatagaatgtaatcgcatcgccagaccaaccgccttcttgaattaaatagactgctgcggccatgttagaaaggccagcgccaatcataattgcttttttcttaatcatatgaaaaacctcctagattcagtttagaaatgacgagtgactaacggctttcgaatttttcgtaatccacagaatcgtctctaaaaagttccattttcttagctaataaacaagcaccggttgctgtaacacctacaaaaataaggctgcctaatagaaattttttcatgtttctcgctcccttccattaactacttttgatatctatattataccgcgaattcctaaaataggaagataaaacccttacataggaattgtcagtggtcatgatacgattattgatgggattaggccgctaaaaatcagaatagttaagtttagtttaaggctcttattagtcaggcataattcctagggaagcactaacggatttaaaaaaagtgataggcccccaaatgatggttgacctcaagtcagcttgaggttgtaaagtagtcttattgattagaaaaaggagacttttaaatgcaaaaattatctgccttaacagccccaatgaccttaagcaacggtgttaccattccaggattagggtatgggacatatcaaacaccaaatgaagaaacaaaaaaagcggtcttagaagctttatcagttggctatcggcacattgatacagctaccgtttacggcaacgaacaaggtgttggtgccgctttgaaagaaagtgatatcgcgcgtgaagacatctttgtgacaagtaagctatggaatacagaacggggctaggatgctacgaaagctgcctttacacaaacaattgcaacgttaggtgttgactatttagatttatatttaattcattggccagctaacactaaacaatttgaagccaaagatgctgaattaaatgctgaaacttggcgtgcaatggaagatctatataacgaagggaagatccgtgcaattggtgtgtcgaactttatgccccatcatttagatgcactcatgaaaaccgccgttatcaaaccaatggttgatcaaatcgaagtccatccgggctggccacaagcagaagctgtgcgttataatcaagcgcatgacatcttagtcgaagcttgggcaccacttggtgaagccagtgcgctttcgaatgaaacgattgcaacaattgcgacgaagcacggcaaaacggcagcgcaagtttgccttcgttgggggattcaacaaggtgtgttaccattacctaaatcaactcatcaagaacgaatggcgcaaaataccgatatcttcgattttgaattaacagatagtgaaatgacccaaattagtgctttggaaaacttaggcggtcaatgcatggtgccagatgacgttgatttttaagcaagtataaggaaggttaatatggcattatcaattggcgtagtcgcccaacaatatgatttgagtattccgacactacggtattatgaagaacaaggattattaccgtttattaaacgcagtccggctggtcggcgtgaattccggcaagctgatttagactgtttatgtgatattgaatgtttgaaaaaaaagggtatgcagttaaaagatattaagcaatacatcgattggcgaactgcaggtgatgaaactttggaccaacgcttggcgttgattcaacaacggcggcaaatgttggctaacgagattgaatcactgcaagcagaattgacgaagctagatcataaagaatggtattacacaaaggcacttgaagccggaacagaatccatttttacagctgactgtgatacagaatatgaacgtgcgcatcaataatcgaaaaaagaggcaacctgataggttgcctctttttgtgtgtttaaacggttaatgttttttgcataatcagatcacgttgtgcgtcgcttccaagttggaagatgtgatcaccaacttggctgaagccgaggtttttgtaaaagttaagtgcagcagtgttgtgttcccacacgccgagccatacgttagttttatggaattgttgcgccacggctagtgcatggttaattagttgtgttcccaaaccaagtcgcttaaaggactgtcgaatatagatacgttcaatctccagtgaatgcggggcagctttttcagtttgtgcgccatcaatgttgagctttaaataaccagcgacttcgccatcttgataaataaaatagaagaacgaatcgggattctcgagctcgctagttaatcggtctgtattataagcttcttctaagtagttagcgagatcttctgctgcattttcagcgccaaaagttgctgtgaaagtttcacggctgatggattgtaagtcaggtagttggtttaatgtgacagcttgaattggcattgtgatgcctcctttgttgtaatagtgtcggacgtgtccctttttgacaaaatcccagtttgcggcaacgttggcactaactttgtttaggagtgcttcaagattatgggcctcgtcggtcgtcagtccagtcagtgccatttgatttgaataatcgttttcagctttgatggcgggatagacggctcgaccggcctcggtgagatagagatgtttgatcttacgattggttttgtcagggtatcgttcaactaaaccatgcttaattaattgttgaacggcgcgcgtgactgttgcgcggtcgacttttaataattcacctagacgttcttgaatgatcccaggctgttctgcaatgcggactaagtaaaggtattgcccgcgggttaaatcatattgttggaattcaatattagcaatggattccaacgcgcgggctataaccccgattgggcggagaatttcagtcatgatggcatacctcatttcgataaaaatagtataaaatatttttgttgcatttacaacaaaaaataaagcttcgattcgttaagtacgccaaaaataagaatataattaattctcgaaggaaataataagaaagggttctctgaaatcggcttctaaagtcgtaaaaggcgcttacaaagcctatattttatgatttgttaagtaagcataatgtttatgtaatgttaatgtaacattcgccctatatacttagtctcagagttcgggcttaactaataggagaaaataaaccatgtcatttaaaaaaacgattacgactacaattgctcttggattattaacagcttcagttctttcaacaaacgtagtatctgctgcaacttcaagtgaagcacaagaagcgattactgctaataagaacgcaacaaacgatttgctcaaacaaatcgaatcagctaatacagaagtgattgggttggatcaaaagatttcaacaaacgcttcaaaaattgctgatcaagaagcagcaattactaaagcaaataatcaaatcgaatctctttcaggtcaaattacggatgctcaaaaagaagtttctaaacgaacagtcgtattgaagaaacaattagtgaccttacaagaaaagagtggggatgctgtcagcgggaacgtatatgttgacttccttttaaactcaaatgacctttcagatttagtttcgcgttcattcacaattaataaattaaaccaagcaagtaaagaagctttagatgatgttaacagcgctaaggtaaaattaagcggcttgaagacagaacaagaaaatactaaagcaagtttagttgctactaagactgatttagaaaaacaaaaagcaaacttagaatcattgaagagtgaagctgatcaaaaacaaacagctttatcacaaaaaatcaatgataacaaagacgaattaacagctttacaagcagatttcgacaaagcaagtactgaagaagcagacgctgctgctaaaaaggctgcagacgatgccaacaatgccaacaatgctaaaaaagacacacctcaacctacatcaattgacacgccatcagataataagggtggcacatctgttttcggtggcagcggaaaagttgctggtaattcagctgggaattcatatgcatggggtcaatgtacatggtatgttaagtcagtagcaccttgggctggcaataactgggggaatggcgctcaatggggtgcttcagccgcagcagctggcttcacagttaaccatataccagcagcaggcgcaatcgttagctttgctggtggccaaatggtaggttcttgggccgcagatgggacatatggtcacgttgcttacgttcaatcatacgatgccgcagctgggacaattatcatcactcaaggtgggatgggcttcagcaaccctgctggtcctaacacccaaacaatttcaaatgccggggcatttacttatatccataactagacattaatgattgaaggcccgcatcctagatgcgggcctttttttatgaaataaaatcaattttataaaatataatgcctgtggagcagagcaggattactagttcgcatattgtaggtcctcaaaatagatagaaggagtaatgcttattatgaataatcaattattaatgctcattaaatatcgtaatattttggatcaattatttgtcacagttttgcaaaatgttgacttatcactcgaacaatatttgttgatggaaaaaatggatcgtgaaaaagaagaaacgcccggcaaccttgctgcttgtatgggcgtttctcgaccagctatttcccgccaatgccaatcgttgggtgaaaaaggattaattgaacgggctaatgtggggagttttattggtgatagtcgtaaagtatactatcgacttacaaccaaggggaaacagttattattaaagattagactaaacagtaatgacatgattgatagtttggattctggatttgttactaccaattgggatgaaattgataaccaaattgcgctaatgtccgacgcggttaaaagaacattcaatatcaatgagattcaaatcttttagagagactatcggaatctgaacgggggagttatttagtttagcgcgtgttaatgggcaggatcgaagcgatggatgtcgagtatgattatttttgaatgtaaccggttgcgatgaattggcataaacggtatattattaaggtatctaagggataggagagaactaagcatgacaattaaattaatcgcatccgatatggatcataccttattaactgagagtggccagttgccaccaaactttataccaaccattcagcaattacatgctaaaggggttcaattcgcagctgccagcggtcgaccaatgtacacgttaaagcaaatgtttcccgaacttgctgacacaatggtttacgtcagcgataacgggggtgcaattggttatcaaggtgaaactttattcaaaagtttattgccgttagctgattaccaacggatggtccaattcgttaatcaaacgccagatgggattggcgtgatttgtgggatggacgcggcgtacgttgaaacacaatatcgagattatgacgcgactttgcggcaattctatgccaacattgaatatgtacctgatttaacgcaggttagtgttgaagccaacaagtttacgatttatttcccggaaaaagatagtcaagcacagtatgaagctgttttcgcacccgaatttgaaccggcttattcagtaacggttgctggtgttgaatggatcgatattatgaatcaaggcatcgacaaaggccatgcaatgcgctttttggcggattatttcaacatcacgccggcgcaaatgatggccttcggggatacttataatgataaagaaatgctgcaaaccgttgaacatagttatttgatggggaatgctgccgacgatatgatccaatatgcgacttatcgtgccgacactaatgagaactatggtgtgttaaaggagatccagaaattactttagtcaaccaatcgtagatgaattggtaatgctgggtagcatctgtttctaataaaatttcatgcgctgtatgaggtagaatgcgcaccgttgcgttgttaacggtgcgctttttgaattggttcgttaaatgccgcgcgcggcgaccataaccgccagctggatcgtcggcgccactcattacgagaactgggcgggattgtaaggcaagttgccaatcagcatgccgagttaactcagtgagggtgaagagcattgcaaaaccgctatttgaaaagacgtagccacacaatggatgctgttcgtaggccgccacgtttgcttgattgtaacttaaccatgaaaaaggtcggtgagcatcaaatcgtttaggatagaccccaaacgccaagttattccagacagtaccggggcgcttagctgcaatggcgccgattaatttaacgattggtaaggcggatttaagaatgaagggtacatcgataacgcccatgaagatggctcaagtaatcggcacttcagtttgcttaacatattgtgtcgctagcattgagcccattgagtgtccgagcacaaataatggtagctctgggtattcctcgtggacaatgcgaccgattaaggtacaatcgttgactagcgtctggagcccgtttggcccgaaataaccgagctcatcgttggactgaacggagtggccttgcccaatatgatcgtgtccgatgacgataatcccacgatctgctaagaattgagcgaaagcatcataacgttcgatatattcggccatcccagttagaatttggacaactgcgaccggtttttggattggaaaccaagtcacgacatttaaagtatggattcgatcagtagattgaacggtcaatttttgcattggttagcgcctcccgaaaaagataacgtactttacgattcattttagcagaaacaatctagagataccaaaaggacgccaaacaactttaaccgttgtttggcgtcctttttagtcatgcttaaagttgcacatcatcgttaattcgtgttgcgcgtgagaagtatttcgaatagaagcgactgataattccccaatagtaaaagatgagggctaatgcgctaattaagacgaaatcgagtgggtaaggaatcaggttaattccgttgaattcccgactgcccaagaatgaaatcagcgaaagcaatgcgagatagataattaaccataagcttcctttgaattgggcccaagtattttcccagtgaatccgatactcatagtagaaataaaatggtaagccaagcataatgacgccaatcaccttaatggttgttggccacattgcccagtaagttgctaaactggcaaggataaaggataatggcgacatgattttcatccaaggtgactgaacagggcggttcatatcaggggccattttacgtaatgacatgacggtgaccgggccggttaaataggcaatcaacgttgcggttgaaatcacgctggctaacgttccccaacttctaaaaattgaaacgagtagcatgctgacgatggcgttaatgaccatcgcaatgcgaggaatattatattgttcgttcatgcggccgacaatcggtggcatgtgtttgttctgctttaatgctgctaatgtccgtgcacatgaagcgacaaaggaaacgccggttccaaagggtgaaacaaacgcatctaagtaaagtaagacggctaaccaatggattccaagtaaaatggctaagtcggcaaagggtgattggaagtttaaaccgtgccaaccgactttggcgagcaaggcgggtgaaacagaaccgataaaggtaatttgcaagagtagataaatcacaatactgatcccaagtgaaattgcaattccacgtccaatattccgtttagaatcacggatttcactgccgacattgattactgtttgaaaggcattgtatgaaaagataatcccagaaatcgaagtggctgcaaaaattttggcggaaccatagggcataaacgtcgccattgaatgcccgaagttgccagtatggaaaccagttgagactaacataataatggttaataatggcacacctaatttaaagattgcaatgaagctggtaaaacgggtcaagaatttaacggaccagaaatttaaaagggtgaagacgatgataaaggcaaagacgacgagcaagccacgattcgaaatttcagcgtggtgcataaagtgattcgtccagttagcccacgcccatggccaagaactcatatactggacagcagcgacggcttcgattgggataatcgtgactaatgatacccaattggcccacgctgcgatgaagccgagtaatgaaccgtgactatattgggcatagtgactcatcccgccactttcaggaaacatcgtcccgagttcaacgtaattaaaggcaattgcaccaatcacaattgcgccaacaatccaagagatgatggctgctgggcctgccacggtcgttgcctcccatgcaccaaacagccaaccggaaccgatgatggaacttaaaccgagcatcactaggctaaataaactcattttgttcttctctatcataaagacctcctgtgtatggtgtgccattatagcaaccatcaccgttggtttcaaattaaaaatacggctaaaatgagtcgtgaagtctatcaaattaacaatggtaacgccttctgaattaattattaacaattaaaaaaaccgtcacaaaaagtgacggttgaatagttaatttaagtcaattgccccgttgaatggcatccgtttgtttaaaaagatttaatttacgatcgttccagaatgtttcagacatatcgcgatagaagatcgcagtctgacagcctgggcaacgtttgataccatattcaattggcgcctgacatgcagggcaatgaaatgcggttgattcaggaattgtattttgcgaatcggccattaaaaggactccaatcaagttgttatcaatagtataccgcatacatacgctatttgttaagcgtttaaacctttttttttcaaaaaatatgcacaaatcggaaataatatgctatactatatcaagtaatgcgagtgtagtttagtggtaaaactcaagcttcccaagcttgcgtcgcgggtccgattcccgtcactcgcttaaagattcatgcaaaagaggttgcaacagaagaaattttgttgcaacctcttttttattctctgaaatttaatcctcggcggatacccgacttacatcacactcttttcgttatcagacctaaggccgattgtttgtttaaaggcgctctgataaagtatatttattatctatcgactaaaaactcgtgacacttacgagcaatctaagtagtgggagcgtacgacattgacattattagagattaaagatattcacaagtcctattatatgaacaaggctgaatttaaagtcttaaaaggcatcaatttaagctttgaccgtggcgaatttgtttcaatcctcggggaatcaggcggcggtaaatcgacgttgctgaacatcatcggtgggttagatcaccaatacgatggggagctcatcgttgatgggacatctttaaagaatgcatccgaaaagaaatttgatgcttatcggagtcaaacgattggctttattttccagagctttaatttaattagtcatttgactaacttggaaaatgtgatggtgccacttgaaatgactgatctatcacataaggaacgggttgccaaagcgaccgccttattggaacaagttggcttgaaggaacatatccataaacatcccaaccaattgtcaggtggacaaaagcaacgggttgctattgccagagccttggctgctgatccagatgtcatcattgccgatgaaccaacgggtgcgttagatagccagaatacggccgagattctcgaaatcttacaaaagattgccgaagatggcaaactcgtcatcgccgtaacccattcacaagccgttgctgaccacggaacacgggttgtccacatggttgatgggcagattgattatgacaagcaattaaaaccagcttacccagctccaactggtccggtaattaagaagagtagtccattaagttttatgtctgctttcaaaatggcaatgcaacacatgcgctacgatattaaacggaatttgctcattatttttggcgcgtccattgggattttctccgtcattttaatgctaggcttgggtcaaggggtgactggctatattaatgatcagatttcatcgcaagttaatccaaatacgattcagattgcaagaaacctcacgcgcaaacagattgaagccggtgaacaaggtaacttagctgataaggatatcaaccgccttaataaggtcaaaaacgtgacgaaggttgaaaagggctactacatgaatggtgtccaagtgcactatcaaaagaagagtgaaacagtccaaatgttccaaacgtttaataaaaccgaacgtgtccaagatattaagaccgggactaaacctggggccaacgaaattattttaacgaaggcaatggctaagaagttagataaaaattacaagaagatggttggtcggacagtaaccacttacgtcaatgccattagtaaggatcaacgtccagttcaaatgcgccaagatgtgaaagtttcagggatcatcaattctgggactgaagccgtcacatatggcacattagccaagatgtaccaagcgcaaggattagagtttgcacccaactttgcagcagtcacggttaataagacccaaaatgttaaagccgttcaaaataaaatcaaaacctacactagcaaagtcaacggtaagacacaaaaggattaccaaatcacaggggttggtgcgatcctcgattcaattaacacttacttgatgttagccttctacgtcttagctgggattgccgggatttcattattggtttcagcaatcatgattatcgtggtgctctacatcagtgtgtcagaacggacgaaggaaatcgggattctacgcgcaatcggcgcccgaaagaaagatattcggcacttattcgtctcagaagccttcttgattgggttattatcaagtgttcttggtgccggcattgctggccttggacaattgcttgtcaatacgttggcccaaccattaacgcatatgccaattgtggcaattaccagtggctacgtcctattcgggataatcatcagcattatcatcagtctcttagcggcactagcaccttctcgtaaggcagctaagttagatccaattgaagccctcgcggcagaataattgcgcttgaaaagtgcagctaagttctatatactagttatcaagttcgaacagtcaaaagaatagcatcaacagcgatttatagcgagctcacagacggtgtaaggtgggtaatcaagttgacgcggcgcgcttttggttgaacaattgcatactattgagtggatcgattgatcaatcagagtggtaccgcgggaattctcgtctctttcatttatttggaagggacttttttttgttcacaaatattaggaggctatcaacatggattttaaacaacaagtcaccactgccttaatgggcgttttaggggacagtttaccagcagataaagtagcacaactcattgaaacaccaaaaacatcagacttaggggactatgcttttccaacgtttatcttagcgaaaacattacggaaagcaccccaacaaatcgcccaagacttagtcgcagaaatggatcaagccggctttgaaaaagtgattgccaacgggccatacatcaacttcttcttggataaggctacgtttagcgaccaaatcctcaaaaccgtcttaacgcaagccgctaattacggccaaagtgacctcggtaaagggggcaacgtgccaatcgacatgtcatcacccaacatcgctaaacccatctcaatgggccatttacggtcaacagtgattgggaactcaatcgccaagattttgacaaaagtgggcttcaacccaattaaaatcaatcacttgggtgactggggtactcaattcggtaaattaatcgtagcttataaaaaatgggggagtgaagaagaagttaaagaagacccaatcacgaaccttttgaaatattacgttaagttccatcaagaagacgttgaacatccagaattagacgatgaagcacgggcatggttccgtaagcttgaagccggggatgaagaagcaacgaagttatggtcatggtttagaactgaatcattaaaggaattccaaaagatctatacgatgttaggggtcgaattcgactcatttaatggtgaagccttctataacgacaagatggacggtgtggtcaacgcacttgaagcaaaagggctcttacaagaaagtcgcggtgctgaaatcgtcgacttaacagcttacaacttgaacccagccttgattaaaaaatcagacggcgcaacactctacatgacacgtgatttagccgctgcgatgtatcggcatgacacatacgacttcgtgcaatcattgtacgttgttggtggcgaacaacgggaacatttcaaccaaatgaaggccgttttaaaagaaatgggcaacgattggtcggacgaaattcaccatattccattcggcttaattactcaaggtggtaagaaattatcaacgcgtagcggtcgtgtgatcttattggaagaagttttaaatgacgccgttaacctagcacaacaacaaattgaaaccaaaaaccctgatttaccaaacaaagaagaagttgcaaaacaagtcggcatcggtgcggttattttccatgatttgaagaatgatcgtttagataattttgactttgacttagaagaagttgtgcgtttcgaaggtgagacaggtccatacgtgcaatacacaaatgcccgtgcccaaagtatcttgcgcaaggccaaccaagaagtcgcaatggacgctgacttagtcgtttcagatgccaacgcttgggatgtcttgaagatgctcggcaacttcccagatgtgattgtcaaagccagccaagaatacgaaccatcagtgattgccaaatacgcattacgcttggcaaaagccttcaacaagtattacgcaaactcaaaaattttggcagacgacgatcaaaaaaatgcgcgtctttcattagtgaagagtgtcagcacagtcctagaagcctcactagacttattaggcgtacaagcaccaaaagcaatgtagagtgcgtttaaagcggtttgactctgagcatttgcctaatatcgtgaataagcgacgcagtcgattgtttgcgatatgtagcaaagcacaagagtcagctttaaaaagcatgtttaaaaacagagtgcctttgaaacggtttgaccttgaggattaacaaaaaaatagcgattatggcgggttttagccataaccgctatttttaggttaaccggaaaggtcagtttcaaaaagcacgtttcagatcagagtgtgcaagcaggcggttatatttgagcattaactggatttggcgaattgacgatgtcatcgtcgatttgataaatttggttaagcgcaggaatatgcctggagcacatttaagccacccgattaaatcaatctggtggcttttttatttttcgaaaaattctaattcgatgacaaccccgccaacttccgttatagtaatcttgaaatagtgggggagggttcactaatggtattagtcttaaaacgccagattaaagggattccggttttggaagtggtcgctgacgaacaacgtcatcagccattaccactcgtgatttactatcatggctggcggtcagcaaaagaattggttttaacgcaagcgcgtaaactggctgaagctgggatgcgcgtggtattaccggatgcactgaatcatggtgaacggctgcaacctgtttcagagattccgtcatggactttttggcaaagtattcaaaccaaccttgccgaattcagtttgattgttgattactggcaccaacttaatttaattcaagctgaccgcatcggcgtcgggggtgtttccatgggtgggatgacaacggcggcactcttaaccaagcatccagaaattaaagtggcggcttgtatcatgggctcgccggcaccgctagcctatgcgcgcttagttcgtgaaaatatccgtgcgcatcagttagcacaacctgacgatctagggttattgacaagttggttaacggcctacgatttaactgaacagccgcaggcaattgctcaacggcctgttttattctggcatgggacagcagatgaacgaattccctatgaacaagtagcagcttttgaacagcagattaaaggtcaaacttatgccaaaaacgtgacatttttaacagcaaatggtgaacgccatctggtgaagccagcgctgatgaacataattacagatttttttagtacgcaactataaaataaatcatttttaaaaagccaacgttaaattcttagcgtggctggtgaattagccctagttttcagctgaatccacgataactttgtaatcaatcttcaccgcagtcttattctttttggcggtcactgaaattggtccacctaagacagcgagtagattctccaaatttgccatgaccacaccagtgtctacggcaaccgcaatcgtctcggcagtcttctctttgaccagagccaatccgaggttgccctttacgaacgagaatcggcgttcaatttcgccacgccggttctctgcgtcttgatcttgccggcgctgcgctggatccacatgctttggcttacgtccaagccgcggtccactgacacggataccgaggttggcacacatgccaatgttttcgcgagttcgatacagtgtgtccaacagcacctcgtctggatattcaccatgcacatcgtaatagtgatcaagtgtcgaaccaagatcgctactttcgttgaaggcattgaacgaaaaccgctcaatatcaatcacgccatccatgatcgaaacatcgatcttcggtccaaattcaactggagactttgatttgccccgcatgatcgggcgaatttccggctgactcaagcttacgatccggttttcaacgcgatgcgtgtggttgcgatacatgtaatcttgttggtcaaagactaagcgaatgacgccaagtcgctttgcccgcgcagcagttaaagtcgctcctttgtcgatcatcgcatccacgtaccgcaagtcgcgacgaatgtattggagctgggctttgatctgcttttgcgtcaattttccccagcgtcgcggtttgcgagaaaaggcagtccactttgcgtgagcttcacgcttgtaagtccgtggcggtgcgatttgaagctgtttagccataactttaatgtcatcttctaggtttgttctcgcctgattaagcagatgcgtatcttgggggaatttaatgtttactggtgtgcacgtggcgtcagtgatcatcaccgacttggttggtaagtggcgttgaagtcgttcgcgaaccgcatcggtgatgatattgcggatcaattctgaaatcggcgcgatccgccgacgaaagtacgccagtgccgtgtgatcaaacgggactttgagttgatactgcggaatgccaatgaagtattgataggccggagtgtcacgaatggcttcgacaacatctcgatcagataaaccagtccgttgcttgatcaactgggccccatataacaacctgaacggtttgccggcacggccaagtttcgacgggaaggctaattggtatgcctcactcaatttctgccaaggcatttgatccgcaagctgaacccattcgttgtctgcactaagtggtgtgctcaaagcggtgccaaaggactcaattgacagttgcgtgactgtttgacgataaaccatggataacgcctccgatagggttgtgataactgcatgggaaatcacggatatgccggaaaacctatgcatctattgtacaacgataacgggttaacggactgttacaaataacttggacaaattattcaccagccactaactatgtttacaagaactggtttagtcggctcatggacgaagtccatcagttggcgacctgaactgaataactgaataggtcgtgcgtcgagccgaaaactgggtcggtctgttcgtggtgcatcgatcaccaacttctccgctcagtcagtattcgcaacgctccaaacgttgctttcagaccggccagatgcgatttcatgtcccaaataccgaggtgaataatccaggttaaagtctttgccttcagagaaggcattaaagtctaagcgttcgatatcgattacgccttcgcttagagaacaatcaatcttcgcgccgaattctactttggcatttgctttgccacgctgaatcgggcggatgtatggctgttggagactgacaatacgattttcgacgcgatgcgtcttatgggtatacatgtaccactgttggtcaaacaagatccgaatgactcccaggcggattgcctgcttttctggcaaagttgccccaaggtctaagaactcgttgatgtagcgcagatcgcgacgaacgtattgcaattgtgctttgacctgcttatgaaagccgccgcgttgttgctttggatggcgcgaaaacgccgtccaacagtgtttggcttcacgtttatacatgcgtgggttcggcacacccaattggtgtgccatatcgattgccatcgcttcaagattgagccgagcctgattgagcaacacagtatcttgcggatacttgattttaacgggtaccgctgttgcatcagtgatgactgtgtctaccttgaacgggaccaacgcttcaatcttagcccggacagtgtcgttgacgatattggtaatcagctcagaaatgtcggcaatccgcttgcgaaagtgagccaagctggagtagctgaatggcgccactgctttgtactcagacaaaccaatgaagtattgaagcgccggtgtatcccgaatcgccgcaactacaccacgatctgttagccccattcgttgttgaatcaaaccagcaccataaagcatgcgaaaaggcttcgcagcgcggccaagattcttggtaaactccaattggtatgcgtcatcgagcgccttccatggcataacctccgccaattgaacccattcgttatctgggctaagaggtgtgcttagaccagcgccaaaagattcaaatgatagttgaagcgggctgtgacgatatgccatgagataacctccaaggatattctggaaaaatgcacgagaaatgtgcgaaatcggtaattttctatggatttattataacgcaataatgagcttatgggttgaaatgcttgaacgttatagtttttaaacggccactatgctattaattgcaccgatgtgacagcgtgagttaattttaactcggtctccaatggatatctgaggcgtatactgaaaatctttgaacgagtcccacgcctctattcgacaccctggtcctccataaaactgatcaccaatagaaatatactccccgcctcttatacttaggctctctgtaactctagcttgcttcccaatccgcacaactttttttaattcatcttctgaaagcaaatgcaacaattttgaacgtaaatgtcggactattttagcaataattctcattgatatgcactccaactgtattaattaatgagttcccttacaaagttaataacctccgagaattggctattgcccttgtaataatcggtattggtctcaatttcgaatttcatcgtttgactacgtttaactgcggtgttaattcccatagccaaatcatcaaaagtggcacgattgacggaaataatgtttgagctgaatgtgcttaagtctttgcagatgaaggaatttgttacggtttgaacgccagcagtagccatttctaatggcggataactagggtgaggagaactcatcaatgacagacccacacgactagtcactaataattgagcgtaatcttctaatgttagctttcccaatgaagttaatttgaagccatcagccaactcaatatctcgatgttttgacccgattgaaataaaattccaagatcgatctggacgatatctcgtgatatatgtgtttagggaattcacagcgagtgcaaaacaatttctgtcttcaaacggacgcccatacatgagaacgttattcactttcggttcttgatgttttagcgcttgctgttgcatagtatctttcattacagaatttaacactggttcaaaatagactttggaatcgaaatcgtaaccgttcaattcaaaatatttgtaaagttgagatgagttgaatatcgccacagtatctttagctttataagtcgaatcaactagcatactctctgatgaccaattaaaaaatcctggctcatagtcttgaatcaaatagaaagttttttgagactttgaaaaaaaatcttcttggcttttagtcaaattttctattacgtacttggttcgccaagacgtggccaagaaaatatcattagcccgaattggtaacatattatgagcacgccaagcaggatcagcagcacatactgtggtgctcgaatcgatgacatcctcctcagccttaatgaacttataatttggatattctcgtatcagatctttatccacaggaatgtcagtaattataattcttgtctccatatgtaacgtgtttgcaagggtattgaaaagtttaagtgccgtgctaataccgccaaagacgtagcggtggtgcaatttagggagtagtaaattcagtcttggtgtgtcagaagactcattcgatttcttaaacttaattaaattcaagtaatcaaaatcaatattgtcatacttattgaactttttttcggctattctaactaatttgttcattttgcgtcctctctcgcgtcaaaatatgctgactcgtccatgcttcacagatgaatcccaagaatataaagtaaataaatgctgttggaaaaaacctaaagagttcaaagaagaacatagaaatgctcattgttacaaatgcagcagcaatactttgaacctgaacatctttagtacgaaaaatcatcagaaatgaaatcaagatcatcaagcaaacaaccaataacacgattatcccttgatcataaaaagtggtaagaaattgattatccgtttcactaaaatcactcattgttatgctaacagagtccatcaataccgaggctgcatccagtccgtggccgatcaatagtgagccaaatgaagtagatggaataacctgatgaagaaaatatgtaatggtcccagtccgctgtaacgcagacgaatcagatgaaagattattgaaccggagaaaaattgtatcaaaaaccccagtctttgatagaacaagcacaataaaaggtaggcttaataaacatatgagtatgacaaacaatgtcttcgaatttacttgccgaattttgaacaggtaccaacctccccaaaatagtaagactatggctaatgcaatccaagctgaacgtgactttgttagaaggagattgatcatcaacagtaccatcagaaacatatttgtcttagtatgttgaaaaaagccaaacattagtatgatcgaaaccgcaactaaaacagaataaataataggatggatataaaacgttgcaattctataattacttgggctgaattgccaataataacgatttgcaagcccattactgacgcaatagttatatgcaattctattgaatttgataatggcttcataaattccatacaagccgcacacgcctgcaataaatatagtcattgtcttaataaacttaactagtgtatctcgacaatggaacaaaataatgcctgcaaaaacgcacgcaaattgaaacgtgactcgaagaaataaggatagggcatcctggtaatgtgtacccaagtatacagccacaagctcgaaaatatacactccgaatattgtcagtaatagcgttaaatttgatctacgtagtgcatttgaattattcagaataaacacaactaagaaacctatgaaaattgtgtatgtaatccgtccttggttaccacggataaagttcagcaacacaacaaaaaataatattcccagtattgtgactggatttttcaacctgagtttgctcatcataacttggcgaatcctaatcctttcatgattgatgtcgaatatacattattctgagtaatggtccaaaaagtgaaacacgacaaaaggcaacaattagcacgtccttccatgattgagtaacaacccgtcccctaaaaatatcattattaacaatgaacttgctgaggagcttcttctgctctccaaatttaagatccgttcctgttcccatcagaatgttatcgatataaacttttagatagggtagttttctttgatctattaattggcttgcctcttgaccaaaaaaattttcaagcatctttttttcatgactcagtgataactcaaccgatacacatctattgtaattaaactttcgtgatgtactatttccaggtctagaataatgaaaataatacacacttggattgacacaaattttgatattcggtgacgcttcaagacagtcaaacatgaaattacggtcttcttctccggccttcatttccgtgctgaagtgaacatgatttttctccaagaaatctttccgaaaaagtccatcccacacatacaaaaagatgggcccatcactcaacgctacgaaattttcgaaaagattatctcgcgtaatcacgataggttgcgaggttgtaaacttagtatcaacggaggtcttttcggaaataaaccttcttccaaatttaacgatatctacatcttttgacttcgccaatttaagattgtctgcaatcagatctttttttaataaatcatcattgtcacaaaatgcaatccattttccttcggctaatttgatgccagtatttcgagcttgactaattccagaatttttctgagaaacccatttaactctattgtcttcgagttgagctctcttgcaaatttctgcgctattatctgtagatccatcgtcgataagaattacttcaatattcttgaacgtctgtgacaggatactttcgatggttttttgtaggtagttttgtgcattgtaaacgggaacaatgatgctgacttcaggattcacacttatcacctctcatatactgaagggttcggaagaatctgatcaaatgccgatattagatcacgttttcgattctcaaaatcaaccgattcctcaggatcatttaagcaaatcatcttctgtttctgcttagtaatgccttcagtgatttctacaatattatcgtcttcaacctcgtatctaagtcccatagcagcatgaggactaaacttgccagttgcaatttgccagtatctgaaaatgtactggttaacgtcataataacttctgaatcgatgatgccgagttgcatctagcggtttaaactctttactccatacttcatccagcgttgacttaagcattgcaactgggaggtgtgcatttttgaaacctgtaaactccttccaaggaagtaaaaaaagatttcgaacgttctgagcgccgtaatgaggattaaaccattttccaaaatttttcttcatttgtgtatacttgtcaaaattccggttgatgatatctatgtcattcaacatttgatgacagtaagcactttggtcccccaccgacgcaatcgtcccttgcaatccttccaactttggaagtccctgtgcatcaaagaaatcctcttggtcgactgagttcaataaaaacatgtcatcattgaagtaaatgaaatgttctgctagattcgggatttgattcatattaacttcaatggcgcaggaattgaacagtggcagacaatcttcaggaataaaatcttcatgtcttactacgtgtagctttggcgcatccaaatttaagaagttcggcagatgtccatatgttacaaaatgaatttttctgacccatggtgcaaagttttcaatcgcacgaaaccagtatctcattagatcccaatcacgaaatcgattggtcgaattattgactttatccttatcactctgatattttgctttttcagcaacccatttgggatcgtttccatccacccaaagaatcacaacatcaatatccactctcttatcctctttaattaatattatttgttttcagtatcacgtaaatataaatcataaaacctttcattcttcattttttttgcatacgttgtatgtcgaatacacgattcaacatttatcaatgggatccttgcagccatacgtttaattgaagacgaaataatttttttgcgtgagtctttatcatccttccaactgccctcgcaccgatgcaaagcatgcttctttcctatgattggtccaatttcgaattcttctttggaatatacactaaaatcattgaggtgttgggttttgccattcaatttaaaatcagaatactctgtcttaagataataggtgagtaaatcgttattgcatgtgaaattgatgtttccgaatctttttacataaaagtttttataatcatcatcccagtatgcttcttcgtataagtcaatcaaatctccaagaattcgatgatgcttgactgaacccatgacggccgtaccaatactggaatcaaaaatatagcccacaaaaaatttttccgttaaaagagtatcaaagtttctcgttaattcaacgtctgtatcaaggtagatacccccctcattgtataacgctactaaccgaaagtagtcgctaacgaatgcccactttttttgttctacagcctgccttacaaatttgtttgcagaaaaatcacaatttgtttcgttccattctttgataaggtaatcagtctttaatggccaagtggccatgcattcttttacattttgacttttttcttgtgaaccaaaccaacaataatgaattttccttggaatcataagttagcctccatctccaattttcttaaatactgattgataaattcaatcgcagtactttgatgtgatacatatggatctaactctacattcatcacggtttgtattgcctgggacaacccagagatttcagtacacatcacaacctgattattgcttgaaaatgcctgagctatttctagctgatggtcatcaacgtgttcaccaaatttactcaatctcggaaccactaaaacaggcttattttttttctttgctgtaattatactacctacaccgctgtgcgtaattacaacactagaacaatcaatcaactgttcaaattcttcctgattcacaaagcgcttaaactgataatgttgtggttcgtaatcagaatgaccaatttgtgcaaaaacttcttcacgtaacgatccgttttctactaacacgtcaagctctttgagtaacctgttgaactgaaacttttgtgtccccaaaatcacaaagatcataaaaaaacctcactaaaaaattgcgccaataaactttgctttcggatagtattttaataatgattcccattgtactaaaaatacatccgcaaaatgatatagtattcttccagttaacgacggccgctctgtacgtgcaaaagattcaatatagattacctttttcctaaacaattttgccatgatgcatattggaacggttgccaaggcacctgttgatattaccatttgaggttgttcttttctgaaaatcttaaattcgttaaagatcagcttcatgaaatggatgaagaaaaatttttcattccggtttatctgcttgacataatacgttgtatctgtcaggttttggtcaaggtcatcgcttttttctgtgacaataaagtgattcgtcgtatccatgatttttttcaaacacatcaactctgtgagatgtccaccggaagaagcacaaaaacagattttcacgattaatcaatcctccaattgagtcatatatagttaattaagttgatgatttgaaaccaaactaacacatgtactgagcattctgaatctcaacatagcttgattagtatatttgagatgtatcgtctgtcaacaactatttttaattaattattacttagaagttataactccttaagcaacatataatatgttatcatgttttcaattaaataacaagtgtttttcaaaactttttatttaattgacgatactgcttatcactaatcagctcgcttttgacaactttattagtataccaacttgcaacccgtgatgcaaggattttctgtaaataaataataattatcttataacaataaaaaaaggcccttagctatactaggggccttcgtttttctactattaaacgtagaggtttttaacttgtttttgtaattccggatgtgctaagaactcatcatagttcgtttcagcacgttcgacaacaccgttcgctgatacttcaatgatatgatctgcaattgtttgaataaactgatgatcatgcgatgtaaagactaaagcacccttgaaatcgatcaaagcatcattcaatgaagtaattgattccaagtccaaatggttggttggatcatctaatagtaaagtattcgatttttgcaacataatcttcgatagaatacaacgcactttttcgccaccagaaaggacattgatttcttttgtgacttcatctccagagaaaagcatcttgcctaagaaaccacgtaagaaagtattgtcatcttcacccttagcggcaaattgacgtaaccagtctaagatgatgagttgatcatcattgaaggctgagttcgtatctcttggtaagtatgattgttgacttgtcacaccccaggtaactgtcccagtatctggctgcacttcacctgctaagatttgcattaagacagctgtcgcaacgtcatttcgtgaaacgattgctgctttttcgtctggcttaactgaaaagctgatgttatctaacactttaacaccgtcgattgtttttgaaacattctcaacccgtaaaagatcattccccaattcacgttcgaaatcgaacttaatgaatgggtattgacgtgaagagggttggatatcttctaatgtaatcttttctaattgtttcttacgagaagtggcttgttttgattttgaagcattggcactaaaacgcgcgataaaatcttgtaattctttgatttgttcttcttttttagcgttaacgtttgattgtaacttagcggctaacttacttgattctaaccagaagtcgtagttcccaacgaatgtcttgatgcgaccgaagtccacatcacacatcattgtacagacttggtttaagaagtaacggtcatgggaaacaacaatcacgatgttcgggaagtctgctaagaaatcttctaaccattcaactgaggcactgtccaacccattcgttggttcatctaataataggatatcaggtttgccaaagagcgcttgaccaagtaaaaccttaatcttttgcccttccatcaattcactcatcttcacatggtgtaaagattcatcaatccctaaggcttgaagtaattgagcagcttctgattcagcatcccaaccattcatttcagcgaattcagcttctaaatcagcagctttcatcccatcttcttcagtgaaatcagctttagcatatagggcatccttagcttgcatcacttcatacaacttcttatgaccttgaatcacagtctctaacacttcaaattcttcaaaagcgtagtgatcttggttcaaactcgacatccgttcattagggcccattgagatatggcctgatgatggttgtaatttaccttctaataattttagaaaagttgacttacctgcaccattggcaccgatcacgccataacaattcccaggtgtaaacttcaaattaacgtcttcatataacttacgcccagaaagcgttaagctcatttcactaacagttatcacttgattccctcacttttctttcatgactctaaaaagccaaccgtttcatgtgaaacggctggctttctaccattgacaatatatgcttaactctaacatatctaatgactagttatcaaccaggctatttgaccttagcaatcttaccttgttgaatatagacacttagaatcccgatatcggctgggttgaccccaccaatccgactggcttgcgcaagtgtttcgggttgaattttttgtaatttttgacgaccttctgttgcaaggccttcaattgcatcgtaatcgatattggctggaatctttttagcttccattcgttttaacttcgcaattttagctttttccttatcgatgtaacccgcgtatttgatttgaatttcaacttgttccacaacgcggttatcaatgccttcgactgctggaataaattggattaaatcagcatactttacttctggccgttttaagaagtcgctggctaaaacaccatctttaagtggtgcctcacccttagccgctaaaaaggcttggatttctggggttggtttcaagcgaatggttgctaaacgtgctaattcagcttcaacggctgcttttttcacttcatagctgtcaaagcgatcatcattgattaagcctaatgcatgacccttttctgttaagcgtaaatccgcattatcgtgacgaagcatcaaacggtattccgcacgtgaggttaatagccgataaggttccttcgtcccctttgtgaccaagtcatcgattaagaccccgatgtaagcttcactgcggtccaagatgaatgggtcgcggcccgtttgcttcagagcagcgttgatgccggccatcaagccttgaccagccgcttcttcatatcctgaagtgccgttcatttgaccggctgtataaagattttcaaccactttggtttcaagggttggttttagttgccatggttcaacgacatcatattcaatcgcataaccaggacgcatcatttgggcattttctaagccttcaatcgaatgaatcattttgtgttggatttcttctggcattgaggttgagaaatcaccgacgtaatattcttctgtttcgcggccttctggttccaagaaaatttggtgccgaggcttatccgcgaagcggacgattttatcttcaattgaagggcaataacgtggacccaccccttcaattacgccggtaaacattggggcgcggtcgagattgtcgcgaatcacttgatgcgtcgtatcattcgtgtatgtcatccaacaagaaagttggtctttcaaataagcactatcaggtgtttcgaaactaaagtggtttggttccttatcccctggttgttcttccgtctttgaaaagtcgatcgtggtgccgtccacgcgtggtggggtccccgttttaaaacgcgtgaggacaaatccgttgtcttccaaactttcagaaagtttaatagaaggaattgaattattcggaccagatgaataggttaattcgccgataataatcttaccccgagaagctgtcccagccgttaagatcacactatcagcgctgtaacgggcaccagtgttagtgacaatccctttgcagacaccgtcttcaacgatcaatgattcagcaatcccttgacgaagtgttaagtgctccgtcgtttcgatagtccgtttcattgtccggtgataagcgtgcttgtcagcttgggcgcgtaacgcgcggacagctggccctttacctgtattcaacatccgcatttgaatgtatgttttatcaatattgcggcccatttgaccacccaaggcgtcaatttcacggacgacaatccctttagcaggaccacccaatgatgggttacatggcataaaagccaccatgtctaagttaatcgttaatagtaatgtttcgcggcccattcgtgcagcagctaaagccgcttcagaacctgcatggccggcaccaacaacaatcacgtcgtagtgcgctgcgtcatattctcgcatattttgttctcctttaatatggttcaagacctatttacctaaacagaattggctaaagagttccgtaatcaattcatctggtgctgaatccccggtaatctcaccgagcttatcccaacagttggtcatatcaatttgcacaaggtcaactggcatcccagctgcaattccactgatgacttcatctaatgattgttgtgcttggtttaatagaccaatttggcgggcattagtaatcatgaccgtactttgactattttcaatcccaccgaagaagagtttggcgatttgggcttccaaatcggtcaccccttcgcttgttaaaatagaagtttgaattacttcatccgcattcaccaatgtttggagttcatttaagtctaacaagttcggtaaatcggttttatttaaaataatgatccgtttcttatcagtggtggccgtgattaactcgcgatcttcaaccgttagtggttcactttgatttaaaactaataaaatcaggtcagccttggtaattgctgcgcgacttctttcgaccccaatcttttctaccttatcttcggtatcatgaattcctgccgtatcaacaagcttcagcggtaccccacggacgttgacatattcttccaaaacatcacgcgtcgtcccggcaacatccgtcacaatcgccttatcttcatgtaataggtgattcaacaaacttgatttaccaacattgggccgtccgacaatggccgttgctaggccttcacgtaagacttttccttgttgtgccgtttgaagtagttcaccaatccgcgctttcacaagttcggctttttcaagtagaatccgcgtcgtcatttcatcggtatcatattcgggatagtcaatgttgacttcaacttgcgccaatacttctaagatttcttggcgtaaattcttaatcaggtgcgttaaactcccatctaattgatcaacagcaacttgcatcgcccgatcagtcttagcccgaatcagatccatcacagattcagcttgggttaaatcaatccgcccatttaaaaaggctcgtttcgtgaattcacccggttcggccattcgtgcaccatagctcattaataattgtaagatgcggttcgttgcgacaattccgccatgacaattaatctcaatcacatcttcgcgggtaaacgttttgggtgcgcgcatgacagacaccatgacttcatcgactactgcgtcggttttaggatcgataatgtgcccataattaatggtatggctcgccacttgatcaagatctttgccgcgataaacgcgtttaataatggctaaactctcatcccctgaaagacgcacaattgaaattgccccctcaccaggtggtgttgaaatcgccgtaatcgtatcaaattctgtgactgtcgttggcattttaaatgcttcctttccgaaatagctgcataaaaaaagcgcttagcgtccacccctcccgtcattgcgtaaggggtggacaaagcactttcactactttatcgatatttaattagtttcattatacacgatttttttagagcgtcaattcacaacacctaaaatgtgcgcgctaattccaccacaattgaccggcgatcgccttggccttctgaatgagtttgaacatggtgattagttgctaaatgcccatgcacaattttgcgttcaaaagccggcattggttctaaaaagactggtttgccggtcgcaacgacttcacgggctgctttatcggcaaggtggctgacaatcgctgctcttcgctgccgataatcaccaacttctaggataatggtttgcttgcccttcatatgatgatcaaagtaagtctgcgctaaatattggagcgcattaattgtcttaccatgcttaccaatcaacaagccttctttatcggtcttcaaatgataagtcgtactccgatggtcgtgagttacatgaatgctgaccggtgtgccaatttgagccgtgatggcttccaaataggcgcttaactcagcttccgtttccacaccacttttccgcttttgcggcgtactagttaaattgtctgttggcgttggttcaactagctcttgaactggggctggggcgctttgtttaacttggcttggttgttcatttggcgttagccggacaactgctaagcggcgaccaaaaccgagaaacccttttttgccggcttccaatacatcaacggacacttcctcacgcgttagatgcatagcttgcaacccttcatttaccgctgcttgaatatcgctaccttcatatgttggcatttcaaaacctccgatcaatttggtcactccaactagtgtgagcgcccgattctcgtttattataccatgatataccactttaaaaatagcatgtcattatctgagatagtccgccgtcaaagctaggaattgttgtacatctttagcgatgctatccgcggcagcttgccagaaatccggttgggttaaatcaaccccaagatgtttttgcgctaatgcttcagtcgacatattggccgtatcacgtaatagtgcgatatagtccgcttcaaaatcaggcattgtctgtgccttggcataaatccccatcgaaaaaagatagccaaacgtataagggaagttataaaacggcacgtcatcgaagaagaaatgctgtttgtccgcccagaatagcggatcataatcagtcaacgcatccgcataggcttctttttgagcggctagcatgagtgcttttaaatcagctgttgtttgcaggccattttggcgcgctgtataaaaatgtcgctcgaataaaaaccgtgcgtgaatattcataaacatatcaattgcgttagtaattttctgatccaataaattaatcttcgctgctgggctttgcgctgctttaacagtcgcatcactgacgattagttcagcaaaagtggaagctgtttccgcgacgttcatcgcatagtcttgtcgccaacttggtaaatcattaatcatcattgtatggaacccatgccctaattcatgtgccaaagttgcaacaccattgggggtgccatcaaatgtcataaaaatccgaaaatcatccgtttcaggtaaatcagtcatataaccacctggttgtttgcctggccgatcttcagcttcaatccaacgcttttcaaacgcggtttgtgccaccgaagccatcttgggactgaacgctttaaagttctgcatgataaaaaccgctgcttcatcataagaataacgctgcggttgaaaatcacctacaaccactggtgcccaggtatcataccaagcaagctgttctttgcccattaacgctgccttccgatttagaaaatcgacaagcggcgctttattttgactaacgatcgaccacatcgcttctaacgttgcgggttgcatgcgactcgttaccaatggctttttcaaaaagtccgttgtgccatgtgcttgataatccgttaggcggaagccagccaaatgatttaacgtatccgttaataatggtgaataccgatcccaagtctggtaccaattttgaaagacgcgttggcgtaccttgggatctgggtcagattcaaatttattctgcgcttgtcccgccgataaagtcgtctcaccatcggggacttgaatttcagcaaccaatgagtcgtaatgatcactccatccagttaaaccatctaacgcgaactggttaattagtttttccgtcgcttcatccaaaagttcagcaccattcgtccgtttttcggttagattaaactgaatcgcttgtaaggcaggtgtcgatacaacggttttaaaatctgcgtctgacattgcgaccaatttttttgtgagtgcgacatcaatctgattcgcatcattttcaagcgcattaatccgccccatcatcggtgcaacttgcggattacgttcatccgttgattgaatcatattcacgaaactccccgtttgcttgagacccgcttcaatcgcttgtaactgttcagtgatttgcgttagcgttgcaaatgttggctgatctgtcgcaaacgtccagttctggaccgcttctaataagggcgtcatttgtgcagtcaaatccgccaatcgttgcgtcaacgctggtgaatcaatccccccggcaaaaatcggttctaaatcccattgttctgaataggtcatctctttgtcctccacttttaaacgattgcacttattatagcgaaatttcgcgcaaagcgcgattaattcaaccagatccactagacattttgataatatctgttaaattaggaatgtaagcagatacatatctgctagaaaggcgatgtttatgatgacgattgaacaagtacccgctaatacaatcgcagatttaaaagcactgttaaaaacgacccaagtgcccgataaaattatggcaatgggacccgaactgatccaatacttaacccatattaaggcgagttaattatcagacaccgaccatcttgggttcgatttagggagtgccggcattttaacgttaatcgaacaagtcaatacagcctttttcgatcacttccatatgttcgacgatgctgcaccgattgaaccaaagttaacgcgtaaaattctagtgctttatcatctaaaaccgattgatgatcagcacttcctccttcatttgaaacaattagactattaaacagcaaaaaatcgtaaccaaatcggttacgatttttttattctatcactgttttaaccgtatatattcattaaccgaatgacaaattgactgtaaactaaaagtccgctgatacgtttaaacgcgtatcggcggacttttttgcaaggtgttaagcgttctttaaagcaacctgagctaacaataggccaccggcaatgccagaattgttacccagtccagcgggaacgatatagtcatccagtggtgggacttcttcgtagccatttagataggcggcaaacttttcacgaatcatgggaaagagctgccgttgattcataacaccaccgttaagaataattttatcaggtgcgaaggcgacggtgaggttgacacatgcctgtgcgatgtagtcagcgatgattggccagaccggatcgtcaacgggaatatctttcccagctttccccgttcgttttccaactgctggcccagcagctaaaccttctaaacagatgtcatggtaaggacagttggacttgaaatcgtccccaggtaaccggttgagtcgcatgtgaccaagctcagtatgagtgcgaccattaaaaatgtggttctgactaatgacgccagcgccaacaccggtaccaatcgtcatgtagatgctgttagggacgtccttagcgattccaatcattgattcgccataagcggcttcgttaacatcagtggtccagtagagtgggatgttgaatcgacttttaagatggcctaaaaagtcgaagtcaccccagccgggtttgggagtcgtggtaatgtaaccatatttcggatcatcgggattaacgccgatggggccaaatgaaccgataccaatcgcgtcaacgggatgagtcgtaaaatagtcgtctaccgcagtcatggtttcaatgggggttgtcgtggggatcgaaattcggtcgctaacttgcccgttttcagcgcccgtggcacaaacaaattttgtaccaccagcttcaattgcacctaaaagcatagtgtgcctcctgtagttaaaaatgtagtcttatttattctcctaataaagtttagacagttgtagcagcaactgagctagctgccggttcagtcaacgcaacgagcggttcaccagcttggacattcgtgactttgagtcgttcaacattagcgtaattggccgtatttgtgacgactagcatgacggttggatcatagttagcagcttttaaggcagcgacgtcaaacgttccgagtagatcaccttgatgaacggtatcgcccttctgaacgttagtagtgaagtgttcaccatttaaattgaccgtatctaatcctaagtgaatcagaatttcggcaccagcagttgttttgatgccataagcatgatggctatcataagtgacagtgatgaccccgtcagctggtgcgacgacctgatcagcgcttggcacgattgcggcgcctttccccatgatttcggctgagaaaactttgtcgttaacttgtttgagactttcgctagtccccgttactggtgcactgataatctcatcattaacattgatgacggtactcgttggtgctagtgattttacttgatcacgatcgtcaccgagtgttcgtttggcatagataaaagttggaataaatgcgacgacgaacgagatgacagcactgagcatgaatgctggaatcgactttgaagcaatcgaaatgaacccgatgactgatgcgggacccatcgccacggacagaacgtggaatagtcctaagaaagctgaagcaattcctgaggcaatcgctgcaaagacaaatggaaatttcatcttgaggttgaccccgaaaatagcaggttccgtaattccgagtaacgctgagaccccggctgaagaagtcagggctttttgcttttggctcttagtggcaaagaaaatagctaaagtggcggcaccttgtccaatgttggccatcgaggcgactgggaagataaaagaacctcccgttttggcgacgttagccaataactgggtttcaatagccgggaaggtttggtggagcccagtaatgacaatggccgagtagagaaggccaaagatgcccatgccaatccaaccagtcatgttatataagcctactaaaccgttagttaatgcgtcgctcaccgttcgtaagacaggaccgacgattgtgaaagttagaaagccagtgatgacaattgcaaacattggcgtgaacgtaaagtcaaatgcacccttgatatgtttgtggaagaacttctccaaagtagccaaaatataagcaacggccaaaacagggagcacttggccttgatagcctgcttgtgcaacgtgtaaaccaaagacgttccagtaaaccatcttgccggcagccatggtcgttgcaacgctatagccgttaactagtgatggtaagaccatgatcatgcccatcgtagcacccagataggggttgccaccgaagcgcttcgttgctgaaaatcctaagaggattggcaagaaagtaaacggcgcactagccatcgcgttaaccatttcggcgatacctttgaggccagggtaaacttcaacaactgacttcgccataaaaagatgctcggcagtcaaaacgttgtttagtgccattaatagacccccagcaactagtgcagggacgattggaataaaaatatcagataagactttgaggaagtccattaatggatttttcttttgacccgcagcggcaactgccttgatgtcatcgggggtcgcttctttaagacctgttttggcgattaaggcgtcatagactttatcgacatcgccagggccaataatgatttggtattggccgttagtttcgaaggtccccttaacgtccgcgtcgtcatctaaggcttgttgatcaatcttggattcatccttgatgaccaaacggaggcgtgtcgcacagtgggcggcggcttgaatgttgtttttaccaattgcattaagtacgcggtcggcaacttcttgatgattcataataattcactccctgagtctaaaattatttttaataatgcaagcgctttacagacccaataataacaagtctggaaaatatgtcaagcgtttgatacaaaattggattgcttgataatcttgttaaaaagccgaatttgaaacgctgacatgaaaatataatataaaaatgtcaaacgattgacatattggtgtaagcggttttataatggtaacaattaagtcgaacgttaaaaaggagctcatcgtcatgatatggaatcgtaaaacccgttataccccttatgaacagtggccagcaactaagctaccacagctcgttgcccaggcacgccagtctaagtggcggatgcaacatcatattcagcctacatcaggtttgttaaatgacccctgtggcttttcatactttgatggtcagtggcacctgttctaccaagtctttccgttcggtccggtacacggactgaagtcatggcaacacgtgacctctaagaacttggtggattggcatgatgagggcttagcgattcgaccagatacgccgtacgactcacacggcgcgtacacgggtacagcactaccaattgatgatcagttatttattatgtatacgggtaatgtccgtactgccgactggcaacgtgaatcgtatcaattaggtgcctggatggacacggataatcacattaaaaagctgtcccggccactaattgcgcatgctccggctgggtacacgagttcgtttcgtgatccggacttgatccggactgaccacggctactacgcgctgatcggtgcgcagacgactactgagatcggtgctatcttggtttatttctcaaaggatctgaccacctggacgtgtcaaggcgagttgaacgttcccgcaaatgcgcggggttatatgattgagtgtccaaatctggtctggatcgatcaacagcccgtcttattgttctgtccccaagggttatcgcaagcaacgatcccgtatcagaatatttatccgaacatatacttagttgccgatcaattggacctagctcaggcacaattcactgaaccccacgccctgacgcaattggatgacggctttgacgtgtatgccacgcaggcaatcaatgcgccggatggccgcgcgttagccgtcagctggattgggttacctgaaatttcctatccaactgatcgtgaaaattgggcccattgtttgagcttagttaaggaactaacgcttaaagatgggcacctctatcaaaatccagtggcagcggtggatgatttgcggacgacggcgcatgacctagtctttgagcaacaacgggcgacggtggccgctttgaatggcagctttgaactcttactgacggttcccgctgataaaacggtcacggttaacattgctgatcagcaggaaagtggccagctgcaggtgactgttgatgccaaccatggtcaggttatgattgatcggcggcatacggggaattcgtttgctgaagattatggtcagactcgtcaagtggagttaacggcccataagacgataaaaatccggctaatcatagatgtgtcagtctttgaatgctatattgataatggctattccgtgatgaccggccgtttcttcttaaacgctaccccgagtcgccttaacgttcaaggtgacactacggcagttaccggtaaagtctgggaatggcgccaatcagagcatactggagtcgataacaatgaaaccaaaattaaatgatgttgcgaagctagcgggggtctcagcgacaaccgtttctcgggttattaataaccatggctacctgagtagtcagactaaagaaaaagttttcgcggcgatgcgagaactgcattatcagccgaataatatggcacgctcactgcaaggaaagaatacgcgcttaattggcgtcatcttttcagatattagtaatccgttctttggtgaactggtgtcccggattgaaaaaatcttatttgctaaaaattataaggtgattttatgtaatagtgcggatgatccgcaaaaagaacgcgactacttacaaatgttgatggctaatcaggtcgacgggattattgctggtgcccacaatttaggtattgaagaatatcaacaatatggtcttccgattatttcatttgaccggtacttatccgacaatattcccatcgttagttcggataattaccaggggggctggctagcaacccagacattgcatcaggcgggggcgactaacgtggctatttttactggtaagtcacacgctggttcgccaacgaatggtcgccgtgaaggatatgaagcctacttgactgcccaacagctaacaccccatgtccatgaattaccgtttgaattgacccctgcgctgaagatgatggaaattaagacgattatgacacaacatcagtatgatggtattttttgtagtgatgatttgaccgctttactagtgctcaacgtcgcgcgacaactgtcattaacggttcctgagcaattacgcgttgttggttatgatggcacggcgctcatacgtgattatcattctgaattaacaacagtagaacaaccgttagcggatattagcacgttactggtttctctactattgcagcggattgaggatgcgaattgtacactggaatcaaaatatacgttaccagttaagctcatcaagggccttaccgcgtaactaaggagttaatcgtaattatggcagcaacaatcaagtggtggcaacaagccgttgtctatcaggtctatccacggagttttcaagataccaatcatgatggtattggtgacttaaaggggatcacggcccacctagactacttaaagcaattaggaatcgacgtcatttggctcaatcccatttatcgttcacccaacgatgataatggttatgatattagtgattatcaacaaattgcggccgactttggcactatggctgattttgatgaactattgcaagccgcccatgaccggggcttaaagatcatcatggacttggttgttaaccatacctctgatgagcatccatggttcaaacgcagtcgccaggaccgcaccaatcaatatcgtgatttctacttttggcgctcaggtaacggcaaaaaggcgcccaataattgggacgcggcttttggtggctcagcatggcaatatgatgagcagacccagcagtattatttacacacgttttcaacaaaacaacctgatttaaactgggagaatccgaccttacgagagtcagtttatacgatgatgacctggtggctgaacaagggtgttgacggttttcgaatggacgtcattaaccaaatctctaagttacccggattaccagatggtccactgaaaccgcacagtcagtttggcgatgctcgagtaacgaacggaccgcgagttcatgaattcttgcaagaaatgaaccaagaagtgttgtcacagtttgatatcatgacggttggtgagacccacggggtgacaccagcggatgcgctgaagtatgcgggcgctgatcagcacgaattagatatggtctttgaatttcaacatctgcgacttgataatagtcagcatggtcttggtaagtggagtacgcgtaagacaccgttagtggcgctaaagaaagtcattagtgactggcaagtcggacttgaagggcgggcttggaacagcctgttttggaacaatcatgatacgccacgagcggtctcacgttttggtgatgaccgaccagcatatcgggtacgttcggctaaaatgctcgcaacgtgtttacacctcttacagggaaccccgtatatttatcaaggtgaggaactggggatgactgacgctcattttactgaactagccagttaccgagatattgaatcgctcaatgcctatcgtgatttagtgactgagcgccagctgctatcaccggcagatatgatggcccgattagcggcgcgttctcgggacaactcgcgaacgccgatgcaatgggacacggaggttaacgcgggttttagtgacgcggcgccatggctcacggtcaatcccaactatcgtcaaatcaatgctgccgcagctttggctgatccggattcagtgtggtactattatcagcacttgattcaattacgacatcaataccccttagtgacgttaggttcgtttgagctcttgtgggccgatgatccgcaggtattcttatatgcacggcaatgggaagggcggacctggctagtttgttgcaatttcacagccgagacactgtcccgaccactggatcaatatctgacgcccacggccaaatgcttgattagtaattatggcgagcagcagccaaataaattacggccttatgaggcttgggtctaccaactcgcataggtatccaggacttggctaattgaggcggtccttgaaatatacccaatcgttacgattagtgtgaattgggttgctcaaaattctgcgatggtcttaataagcgaccacctgactaaaaaactgcttttaaaaggataacttttgaaagcagtttttttagcgcgcgacgaccacttggcccacgtgaggctcatctagtcgttggtgacctggaatgaagcccgtgaggttaaacggtagttgttcatcgatcgtcgtggtcaattgaccagtatctagcaacttgaatagtaattgtaaggcggcttgatcagaaatcacttcggtcggttggattgcttggaaacgaattgatttactgttggctggcaagtgacgggcgaatgaagcgatggtcgcatcaaatttggccgttgctaagtcatctttgccaccaacgccatcgatagcgacattgattacgacgtcaccgcggtcggctaacacgtgaactggattttgatgctgatagtcgacgaattagccgactcccagtgtcgcaatcaagttagcataacggtcactagcaatctcgataacgtgggcatctaatcgtttggctaactgaataattaacaagccgactgggctgccagtgcctttgacaatcaccgtttggtcggcctggacgtccgcaaagtagcgcaccgttttgtaagcgacaatccctggagtgactaagctgacggcggtgaccggatcaagattagttggcatggtcaccgctagatcgctatctaaacaaacgggtctagaatttttggtgttggaaagtatttccccagtttacaattcaagtgcaacaccctgacgactagaccataaaggccatgaaggcctattcttgttagtgctagctaaacaagaaagcaggaatcttcatgacccactctcagactaacacccacaagcattaccaacaactcagttttagcgaccgtgctacaattcaggcccttcaggctgcattattttattaattatttttttaactcgtcgtttgtaaaattaagttagaaataaaaaagccatttgtggtagacttttgaatatccctaatcaaaagagaggtaaccacaaatgacttataaacatcttaccacatgtgaattaacctttatatataacttttggaaataagatattaaagcctatcatgccgctaaagctcttaaacgttccagcgaaaccgtttatcgtgtttaccggtttctagatgctggtaattcaattagtcaatttcaagaaaatcatcgagttaataaaactcattgcggtcgaaaagcaattgaattaccagaagatgaaaccaaatacattaagcagaaactcgcattaggttggacccctgatacgattattgttcgagctgagatacagatcagttgtagtatgagaaccttataccgactttttcaaagaggtgttttcaatgtgaaattgttgccaatgaaaggtaaaaggcatccaaatggttacgttgaacggcgtggtaaagctggccgactcggcagaagtatttatcaacgctatcaggattatcctcattttcaacatgaatttggtcatttagaagcagacaccgtccaaagcaaagcacatcaaggtgcagttatgaccttagttgagcgtctctccaaagttgaaatcattttaaacatccaacaaaaatcggctgaatgcgttaataaacatcttaatcaatggttgtcccaacagccaaaacaccttttcaagtcaattacttttgataatggtaaagaattcactggttggaaagaaatcgcaaataagcatgatattagtacttattttgccgaagttggggctcctaaccagcgtggcttaaacgaaaataataatggactaattagacgagatggtctcaacaagagcatggattttcgcaatttaccaaatgctttagttcaacaagtcagtagccggcgtaatcgtattccaagaaaatcattaaattataaaacaccaattgaggtattcatggaaaacatcacagataaacagctatgttatttctaacttaatttgacatttcaagagactaaaaaaggcgaactatcgcatttatgtatgccatttctgaaccacaaaaattttgaaagcgccttgattgctaatttatatataaatttaaagaatgtctaataaatttgcttgttaatatacaaatttaaaaattagtcatttttttggcattttttacttatattatatttcaaaaattattcttgttgaaataatttttgcgaagaaaatgagattttcttactgaataaccgaattacccacccaattttcatttttcgctattccatattgaaaatgtacttcaactattttcaataataatttgctcagtttatttttttatcactagttccactctcctatttttagcacgccccgctgatgtatcgttagttgctttggggttattttcaccaaaagcttcaattgagacgttgccttccgtcactgccttttgctgcacgaagaaccgcatgactgaaactgctcgagcagcactcaattcccagttacttggatagtctttcgattcttgtggcacattatctgtataaccagcaataatgacctcattttcttttagttgttgaatttttggccccagttcctttaaagctgcagcagaatcggcagtcagatccgcactaccgctgtcaaataaaatattgctatccaaatttaaatgtagtccgtcagacttgagtgaagcttttgtgttttttcccaagttcatctctgcagcagtttcgtttaaactatgagcaatttcttttaattgctgttcttgattctgttgtgaaatactgccctttactccattttcttgtttgatcgctgcttttttagttttagggtccggtgcctgactatctttttctttattagttactgatggtgaatcaagttcgattgcgtttgatccaccgactgccgcacttttatgattttgttgctctggtgacaaagccatgatcgacccaaactctgaactgattttttggaacttactatcatcgaccttggctgaagcaaacatcacaataaacagggcaagtagcaatgttaacatgtcagaataagggagcatccaggcttcactatcactatcattttttttctttttcttacgcatgcctgtcccactttctttccaatctactcatttttttcaatgtcagttcgtctggtttcactgatcatactttcaaggttcttttccattgttttcgctgaaactccttcttcgatcgccaatgtccctgccatgatcagttctaaattttgaatttcttgttctgatttacgttgcagtcttttagcaaaaggcatgaacactaagtatcccataaaaataccaaataacgtcgcaacaaaggccgatgagatcgactctcccaatacactaacgttatctaagtgtccaagtgcaccgatcaagccgatcacggcacccatcacaccaagtgtgggtgaagtactgccggcagtttgcatcatggcagttcctttagcatgccgttcctcgatcgatgagatctcattttccatgatttcttcgatttcttctttatcgatcccgtcgaccaccatctccatgccgcgttttaaaaacgcatctttttctggatctaagttgttaacaggcgtttccaaggccaacaagccttcacgcctggcaacatttgataattctactaatttatcgatcgttgcgcggtaatcatacttttttgcttgaaataatactttgaaaattcctggtaaacgtttgatgtcagccagcggatatgtattgatcagcgctacaatgatccccccaaaaataatcatcatggcctcggggctaaataacatggctaagctagcaccttttaaaatcatcgctgccaccacgatgaccaacgcggcacagataccgatcagtaaaaacaggtccattttttctcctcctcttcactcttccattttatttatcggacaaaattgaaaagatttaaggaaactcattaaaaaaatttccaaaaaaataaaacgactacagaattaacaagcctgtagtcgtttcaactaaatattttgtttttggctaacttcattccaagtttccaataattcttctaacaatttaacaatgggcggcagcttttccttgtctttgctgacattagcggccactaattgttgcgtgataaagttatataaacgatttaagtctgtcgtaatttgactatcaaccgaatgatctaatgaaaatttcagctcatcaacaatgtcttgagctctaagcaattcatgatttgcctttaccatatcattttgattcaatgcaatttcagctaacttgattgctttgatgcccccagagatcaataaactgatcagcttgttaggcgaagcggtcaacacttgattcttcaaataaaaattacgttgcttttgtgcctgttttacatccatttattcaattcccccgccatcaatttaactattttgtaattccagcttgaagtcacggatcaatattctaattcgatcatcgtcccatcggtaattttttggtggtaagtcccacccctggaagacttttgacgatctaaactctttaattgctgcaacacttttttcttctctttcgccgttacttgcatcagactctgatattcagacattacttgttgtaaaaccactttttgctgcgctgacaagtttgactcagtttcctgcaattgagtcaataattgatcattggcttgtagtaaagctagaatggaagcagttgtttggtcccagtctttcatattttgctttaacttcgttaatatttgttcaacttctcgtttttccaaacttctgctcctcttttatgatcgttattattgttgatctacacccaactggctttgcatgtattgcatttgtgaatcagcttgcatcatgatcgagtctaactgggtaaactgtgcaatatattgttcccgtttatcggccaaacgcgcggtgaagtcatcgatctgcgagttcaagtctttgaccatcttatcaatgctatcgcttttattagtaatgattccctttttagtagcatcgttgctaataaattcattgactagattatttaatttagcagtatagcccgtgtccgtactttcgtcgaagctgtcctcaccttgaacatagaaaaagtcatggactttttccggtgaatcagctaactgtgacttaaacttgtcttcatcaaggctcaaaacaccatccttgtcaacggaaaagcccatatcaaaaggactcagactagcgccattgtctttatcggcttgtgtgatcatatttctcaaagatgactgtagccgttgcaaggtcgaatcgccaaccagcttaccttgaacattagtcgaagaactttccgctgtggaagctgacgggttgcccacatccaagttacttttgatcaaactcattaagttattgtattgtgttacaaaatcagtagcggccttgactgttttagaatcatcattcttcaaggataaagtgacggcatcttcaggcttgatctcttttttcaaggtgaccgtcgcaccatcgatcgcatcagagatcacgttactatcactttccatgtcaatgccgtctaggctatacttggcagcctgacccagatcagcggaagtatttaagcccaaggcagctaaagtagctgtattctttgtttgatccagtgttgtttctttagcacctgatttgttattcgtcaaaactaggcgtttgttgatcactaccgccgaaacaccaatattttttgattctttattgatcttatcagcaatatcgagtagtgaatccttctctgtaatatcaatatcaacagtttctgggctatcgtcagttttttctccttgataagcaaaagtcagtttaccgttcaagttaagatcagtgctattcgtctctgctgcgctgacctggctaccagtcaacttagtttgcttagctaattgactgaccaaaagttcaaaatcaccgccatttttggcgtcggaatttcctgagatcgttgcaagatcttcattcgagcttttagcaattttagaataataactgtcattattctgcaaggctttaagcttagtttgaaaattacttaaagctgatgaaatttcactccaggcagacttttcctggttatatttcgtaactttattttgtaacagcgttttaccgccagattcagcctcaatcaactgatcaacaacatccgttgtgatcccagagtactggcccaaaaagctgagccctgcattgggtgctgaggtagcacttgtaatatcagccatttacgtcactatcctttcttatcgaccgtaattcccatctgatcccagatttttcccaaaacatcaagcattttatgagaagggatctcctttaacactttgccgctttgcatatccaccatttcaacgtactgccgtccagtccgctgatgaatttcgaatttcagtttaaaatcgcgacccagtaactttttattcaatgtatcaactgctttttgcagttcttgcgggtctacgactacattatcggctgaatcctcaacttctttaacgtttttaccatcatttaactgaaaaagtttacccaaatatttttcctgatctttacgaatgaatgattcatccattaatgaagtatccatttcataactatcagtcgcaactttctggattttattaacagccggcgtgggttcgactggtggaatattattgatctgcatgttacctgtcccttctttccgtgtcttacatatattcactccaatatttctagttaaattctcttttgatttagtcaggctgcgcgggtcaacttctttcggcttatctaagcaacagacttcgatgataagaacgtttcgaaatcagctgttccgacaatgcttggaagtccccgatatgccttcaccttgtttttagtcaggttacgaaatgcaaaagcttgcgcttaactaacttcaacaacaagtcgctaaagacatgacttattgttaaagtcccttaatgctcggcttcataccgcattttctccaccttgtttttcttagtcaggttacgtgagacagaaagctctgcctatccaaccttagcttcacatcgcaaaatacgtgatttgaagctaaggtccgatagtgctcactttctcccgtctcactccaccttgttattaaaaaaaccgaccgccgaataaacgacgatcggcctgtgccaataatattttattagccctgaagtaatgacaagacactgtttggcattgcgttagcctgtgccaacattgatgttgcggcttgtgaaagaatattggacttcgtaaagttcatcatttcttctgccatatcaacgtcttcgatccgtgagttagcttcagaaagattttctgttgttgttcccaggttgttaattgtatggttcaaaccgttttgtacggcccccagatcagcacgctgtcctgaaactttttcaatagcagcctgaatgtgagcaattgagtcccttgcactatcagcagtattcaagtcaacatctttagcagggactcctgctcccgtattttttggatcagtagtaccaggttctgtcgcaagagtcgaagtaccactaacacctaatgttttagcatccatactcccaattttgacttcagcagtttgttctttacttgcaccaacttggaaagtaaatttatcattagacccatctaacaatttcttagtattaaattctgtgtttttagagatatcatcaatgttcttttgcaaagcagtaacttctttagtgattttaccacgatcgtcgttagtcaaagtatcgttggaagcttgcactgccaaatcattcatccggctcaagatactatgagtttcactcaaagctccttcagctgtttgaatcaatgaaataccatcttgggcattacgtttagcttgcttcaagccaccaatctgagccttcattttttctgaaatagccaaacctgcagcatcgtcgccagctttgttgatccgtttgccagatgaaagttttgccaaagaatcactctttgaagcattggcagcagtcaagcgtgagtatgtgtttaatgccggtacgttagtgttaattctcattgtttgttcctccaaatattttgtattttgttgcttacaaatatatatatcggaccagttttaaattgtttaagtcattttagaaattttttccgaaaaaaagagccccatcttttgtgatgtgaccccgttcttgttatgaaatcaatttaataccagtgattcttgacccaatgtttctgtgcgttagtccagctgccgtatctttgttggacatattgagccgcaactttttcttgattggcaggtgaaaaatcaccatgcaaataattttgatccagctgatatttgccaatatagcgtccatttcgagcattatagttattgctcgactcatgctgaataatataatcacgtgcacttttttctgccccagccaatgttggctctaaactgttgctagaactggcagaagcgttctcatcaaggtcaacattcgctagtgacgctactgttccagcatcattgaccatagaggtcggttgcgcagccgcacttatttgtgctcttccaggaatagttaagttctgtccggctagaataaaatccggatcgtttaactggttagcctgagcaacagcttgtgtagtggtgtgatatttctctgccaactcagagacagtatcgccctttttgattttgatcgtttgttgtgctgtttctaaagcattcgaaaactcagctgcttgctgcgaattagtcgcctgtgttgcggcttgcatcgacccattattatgaacttgcaggtcattattaactaaattcatttttaaaacccgtttccttctttaattactatcacgattcctaattatatagtgttttaaaatattttacagtatctttttaatatcgatcgaattaatttgcttttcccagcaattatattgaatcgcaaacaccgtatcaggttatgctgacaaatctgtccaaaaattcggattaaatttgcaatctaccttatgaataaaataaaaggctagtcactaaccaaaaattggtcagtaactaggcttttattaattagtatgttttagaaatataagttcagtttaattgcgcaacgggggtttaaaaacgtctatataaaaatcccccgggttactaacacgaggaataagttactttaacggtaactgtttaaaaatttattttaaaagaggcaaactcatcaagctataggtttgaatgcttatcaatatcaacattataaagctgataggaaggcatcattaaatgctgggatatcctttggttcgcgactggtaattagattaccatcgatcacaacagctttgtcttcaatgcgtgcaccggcataatacaaatcaggttgtacagttaaatatgctgtcattgtacgaccttgcactaacccggtttgaatcattaattgtggaccgtggcaaatacttgctgttaacttattagttgccaaaaagaacttggtaaattcgacaaaccgttggtctgcacgtaattgatctggtgaaaatcctcctgggatgaacaatgcatcaaagtcttgaggactcacttcatcaatggatttatcaatgttaatctgagtaccatgcttaccttcaacagtgcctttttcaaagctgatcgttgtcactttgtgtcctgcagacttaagagcctctacaggttcagtatattcaacgtcttcgactagattagtcaccaaaactgcaactgattttgccataataaaattcctcctttttatgattattcatcgcgttttttatatttagagctagttatttgctagacccactattttttttaagacatacctggtttcaataccactttaatgttattatctgcttttttgtcaaaaatatcgtatgcttcagcagcacgctccaaaggcattgtatgtgtaatgatatccgatgggtcgaactcccctttttcaatcatgtcatagattttcggcatcaagtggataaccggagcttgtcccattttaatattcacattacgagtgaagaaatcttggaacgggaaattcgttgctggagtcatataaaccccagttaccatcaacgtcccaaatttcttcacagcttcacttgctgtttgtattggtgagtaagaaccgctttgcggcgtaagaatatctttagttttttctttgattggcgttacaccatccattcctacacaatcaattactacctcagcaccacccttagtcatttcatataattcactaccaactttagaaacatctgaaaaattcacgatctctacgccgttcatttttttcgcatgctgcaaacgatgatcgacgttatctacggcaattacacgtttagcacctttcattttggcaaatttttgtacaaataatccgatagggccagaacccaatacgattactgtatctcctggtttcataccactatgttctacactccaatatgctgttggcagtacatctgataggaataataccttctcatctggtagatcactatcaggaacaacaaaagaagtaaaatccgcaaatgggacacgtaagtattcagcttgacctccaggataatttccttccattttaccaaaaccgaacaacccgccttgatcaaacattggattagggttggaattgtcacattgactttccatatgattagcacagaaatgacactctccacaaccaatgttgaaagggataacgactcggtcgccttttttcactttcgttactgcagaaccaacttcttctacaatgcccataggctcatgccctaccacatagtcttcttccatgaccggtttcccgttatggtataaatgcaagtcagaaccgcaaatagctgttgctgtgatgcgaacaatcatgtcggttggttcttcaatcgtaggatccgggaccgttttgacttccattttttcgtttccttgccatgttactgcgcgcataaaatcactcctttttgtaaaagcgatatcttcagattatgaagacagcttatcatcctgttttatataagtcaaaagttaaaactttaggactaatcggttatggccatattgcgcaaaaagttgctaaaataggacacgctttttctatgaaagttattttctataatcatcgtcctaaaaaggttcctgaatcatggattcagcaggtttcatttgatgaactattaaggcaatctgatgtgcttagtctgcatgtgatccaaacaccagaaacaattgatttaattaataatgatacgattgccaaaatgaaaaacggggttattatattgaatacggcccgaggcaaattggctaatgaagcggacatcaagaatgccttgaatgaaggcaaaatttatgcctacgccactgatgttgttaaaggggagcccattgctagtgatagcccattattacaggccaaaaattgttatattaccccacatattgcttgggcaccatatgaaacaagagaacggttattgcatataactgttgataatataaaagcatatttatcaggtgatttgaaaaacgttatcaattaatggtaatggtctgtgaatttttttgcctgcattgaagtaaaattggctaaaggctaaaataaaacaaatagggcaaaacagagccagcaaataaagcgttaagaaaaatacggagagctagaaatttatagcttctccgtatttttaaaggacacattgtgaatttcttgtagtgggataaaccgatcagcgtcaatcacaaaagaaagcatccccacatccattgcatcaaataaccacgctagtcccgtaaccgttactagttttcttgttgagttcatccaaagtcctcctaataaatttttcaaagtgtcaagacaccccctggtacatgcttattgttttacctttttagaggtgtcttgtcaatgtaaattttcagataaaataaaggaaccgaaacaaaatgtgatttttgatacggttcctttgtttatatctttaacatgcaaattgcaaattagtacgtttttgcttttttatggtaagcaaatctttctctccaacttaaccgttttctttcttatctggtaaagctaaccattttgaagtgtcagaccgcttttagcatcaaacagataaatattagaattacgaatataaagatctaattttttgtggctatcatcattaggaattcttttaggcgtttgagtcacaatattaacaccatctttagtttttagatagacaagcgtatggccgcccatgtattcagccagatttttacttgcagaaagtacaaaaaatccctctttttgtgcagaattttcaggagctgtatcattatctcctgacttttttacctgcgttactttctcaggccgaaagccaagtacaatctctcttttatccgttggcaaaacttcttttttcacgaattcactaaggtcataatttacaccacctgaattaaaaattcccttgttcgaaagagtaccctttaaaatattcatgctgggagaaccgataaaacgagcaacgaagaggttacgcgggttatcataaagttcttcaggtttaccatactgctgtaccactccgtctcgcatgatcaagattttatccgccattgccatcgcctcagcttgatcatgcgttacataaatcgttacagttccaagctgcttatgtagctcgataatatcctgcctcgttgaaacacgtaacttcgcatctaaattagaaagcggctcgtccattaaaaagacttcaggtgcgcgcaccattgcacgccctaaagcaactctttgtcgctgcccaccagaaagctgcgcgggtttacgagccaaatagtctgtgagattaagcttttgtgctgcttccttgacccgtgaatcaatttcacttttagaaaatttactaagttttaagttgaacgccatgttattgtaaacagtcatatgtggatataatgcataatcttgaaaaaccattgcaatgctgcgcttttgcggtggaatattatcgaagcgctttccatctacattaatttttccccttgtaacttcttccaaacctgaaaagcaacgcaatagtgtagacttaccacaacctgatggtccaataattgcaacaaattccttgtcatcaatctcaagattgatatcctttagggtatcatttcccgcattatcataacgcttataaaggtgttcgatttgaatcttactcataagaaacgcctcctcgagtttattctttgcttttgtttctgcagtgattcataataaaaacataaaatttaggtaagaaagaatggtgctcttgacaaacaattgacaatgaatcggggcggaagacatgaaaaaaagattttttaaaatcgctaagctaacttttatgttgagtttatcattaattgtcttaacatgttgtagttttagctcgcaaaaggaaaaaaattcaaaaattacacttaacttttttaatcaaaagcctgaaataaccgcacaatatcaaaaattagcgcggatgtatcatgctaaacatcccaacgtcaatatccaaattactacttcaggtcaaggcggtggggccgctgctttacaagcgaagtttgcctctggggaagctccagatattattatgcttggcgggctacctgaaatagatcggtataaggatcatttgattaatctaaaagatcttaaggcaagtaaaaacatagtaccaaatcttgttagcggtggaatttcaaataaacgtatggttggaattccagtcaatcttgaggcttatggctggtcgtataacaaagctgtgttcgctaaggctgggattggtgcctcaaagatcaataactattctgaatttttgaaagcggttgaaaaactcaattcagaaaaaaagaagattggaatcgatgccgttttcggctttaacggagctgataccaattcaattgcttctgtttcagcacaatttacttctctgccgtacaacaataatcttgtcaaagctttcaaaagcaaaactttcccttggaaatacgagaggcaaatgaaaaattattatgatctcgtaaaaaaatataatgtacaaccgattctttcagttaaatatgatccttctgtccaagacctttttttcaatggtaaagttgctatgatacctcaaggaaattggattattccgacgcttgatggtctggaaaagggatacgtgcaaaaaaatcttggcatgttaccgttctttgttaaaaatgatggtactgaccgtcttttaaccggttcctcatggtatttaggaatcactaaagatcatcccaagcggcaaaaagctgctaaagattttattaactggatgtatacttcaaaagaagctgagaacgtaatcattaacgaaatgcgtttcgttcctgcaactaaaaactttgatgtttcgaggctgcctgatgatctttctaaacaaatttatcggatcggcacttccaaaaacgcacaatctcctgttcacaaacagtacccgaatggctttactaaccaagcacttgggccatatatacagcgctattttgtaaatgggatctcttggaaagaattgaaaaaggaaacatcggctaaatatcgacagctcagggaaatccaaagtggggagtgataaaaatgcttatcaaaaaacatcaatatctggcttttgttttaccagcagttttctttatactattgattattgtcgtaccatttctgataggaatttattattcctttaccgattccaatggtttacgctcttcttttattggttggaaaaactttgaagtcctttttcaagactccacctttctgcagagtttttggctaacagttaaattttcttttgtttcagtaattctaattaacttagtcggtttggcttttgcgttaatcgtcaccagtcacaacaacagactcacaaaatcactcagaaccatcttcttcatgccaaatctgatcggcggaatactacttggttttatctggcaattcatttttacttctgcttttcaggcaattgccgctgcttttcatcttgactttttcaaaggttggttgagcaacccttcaacaggcttttgggggatagtaattctgtttgtttggcagatgagcggttatattatgttaatctatatttctttcttgaatgcaattcctaagaataccattcaagcagctgttctagacggtgcaaaagcaacccagattttctttttcatcaagctgccacaattggcgccagcctttacaatcagtctatttctaacacttgccaactcgtttaaactctatgagcaaaacttagcacttacaaatggtggcccataccgctccacagagatgatttcgatgtatatttataatactgcttttgtaaacttccagcagggatacgctcaggcagccggaattatccttttcctttgtgtaaccattgtttcctttattcaattagcactttcaagaaagcgggagggatagaagatgaaaaaatcaactaaaatcttacttggctttctttttggaatcattgccctattctggttctacccctttatcattgttattatcaatgctttaaagggaaaaaggggaatttttcaaaacccgttatggtttacacgggactttacgttttcaaatttcaaaactgcttaccaggcgcttgattttacaagcagtttctttaactctttagttatcacagtagccagtgtcattgtaatcacattggtttcggcagctgctgcctatgctctttctcgtgttaaagggcctttcagttcaattctctactatctttgtgccggcactatgctgatcccttttcagtcaattatgatcccgcttctttcactttttggcaaagttaatttccttaacagaacgagtctggtcattatgaacaccgggttatcagtaagcctctcaattattcttttttatggggcttttcaaggagtctcaaaaactcttgacgaagctgctgctttagatggagcctatccttttaaaacctttgtttatattatctttccagcgatcagcccaatgacaggtacagttgttatcttgaatgcaatgaaaatatggaatgactacctgttaccatcactagtcgttaataaagatggcatgtacacgattccacttaagatgtattctttcttcggtgaaacaaacagccaatggcaattagccttagccggacttgttttgtcaatggttccgattattattctgttcctcctattgcaaaagcaagtcatgacaagtgtgacagaaggagctatcaagtaaagattggatttaatctaaataaaaatagtacaagagaccaggtcaatctgacctggtctcttgtactatttttgtaatgttcatattattcagcagttggatcctctggacttaattactcataattaaactcagactatgtgcataatttaccattaataccttcctgttaacctttgcgcttgttatttataatcaacatcttacgatcaaatcagtaaaaataatttgtatttgcggacttgtctcgactaaaaattctgggcgcctttgaagaaccaacacttgctgagaatcaattgattttaatgcttcaataaccccattttttacggctgcagtaacttttaagcattcgcccacattttttgctgcttgattttaaggagaccttggaccactactttgacttgcacggacattatcctgatgaagtactagcggacacattatatcgtaatcgagagaacctgaagctatgcaaagacttaggtatccgcatctgtggtcccaaattggggcgtcatccgaaacacgttaacactgaacaacgccgaaaagatactgacgccgagaatcgacgaggtgccatagagcgccggtttgcctttatgaagggttcactggggcttgatttggtgaacactcgaaccgctgaatcgttggccgtaaagatcgatgaggcaatcgtcctgagcaatgtgttggccctgatgcgggtttttgctataccaatttttgttttggcagaatcagaaggagtaacctatcaaattcgctataaatttactacgaaagttgaaaatatggtggcctaattaaacagccactagttacttgacgccaaatgcggtgtgatcgaaagcgtgagctagaagccgtgaatgataaacttttaccaaatgattaatgttgtgcgcttttcttgtataatgaggagtaaactattcagattgaatgcaatcagctttaggaagaggaattttaatggtttcgagaaaacgcgctttaatccaaaatgccgctacggctttggtgagccaattgattatgatggtcgggcagtttgcgacccaaacaatttttgtgaaaaccttaggcgctcagtatttgggtgcgaatgggttatttagtaacttgatccagtttctctctttcgcagaactcgggatcggtgccgctttttcatatgcattgtataaacctttagctgatcacaatcaagccgcgaccactgccattatggacttgttccgtaaagtgtataacaccattggcttggtgattttagctgctggatcagtgctaacctttttcgtcccttggtttgtggccaaagggtcaagtattgatcatattcgttggtatttcttcttatacttattgagtaccgtggtgagttatttctttacgtataaccggtcattgctgattgccgatcaaaagagctatgttgatgccaccaatcagctgatttggtcgacattgaagtatgttttccaaatcggcttcctgttgctatttcatagttatttcggctatttgatcgtgttaattgcgacgaatattttgtcgaacgtcttcatcacgatgcgctcgcgccatttctatccatatctcaaagaaaaaagcgatgtcgaaattgatccatccatcgtgaataacatcaaaaagaatgttgttggcacggtctccgctaaaattggctcgattgtggtaacaggtaccgataacattttaatctctaaatttatcggcttagccgtcgttggcctgtattcaaattatgcgctgattttgaccagtatcacgcgtttattgacgcaagtgtttgccgccgtgattgccagttttgggaatttaggtgccactgaaggcaacaacaaagataaacaagttgatttatttaatcagtttacgttctataatgcgttttcggttttctttatcggtttggtttcatttgcagcttttccgccatttattaaattgtgggtgggttcgcattatcaactggcagagtcaacagtctggtttattgtcatcaactttgtgtttggtcaatttcgaccggcacttaatatgatcaacgcttatggtttattttggggttatcgcgtgaaatcaattgttgaggcggttgtgaactttggtctcagtttgctactggtgaaatttactagcttaggcattaatggcgtgttgcttgggacgattattggcaatatcctggtcaactcttggtgggatccttggattttattttcaggtgcttaccaacgttcgatgctgggtttttatgcgaaatactggatttacatggccgcttttggggcattgcttgtgattgaaagcttcatcatcaagctggtggcaatcaatcctgtaggtttattgccagtaatgggctacatgatcgttgtagctttgatcgtaggaattgtgttactgggcgtgtttgcgaaaacgcgtggtgaacgagaaatgtttcgattgctcaagaatattgtgcatcgttgagagaacttctttaaatatttggcaaagtcagcaaattactagttttcccatttttgaaacccagtagtttgtgataatctaatactgtatgttttggttcagcgacactggaagctgagacttaaaaccagggaggatttcttagaaatgaaaggtattatcctagcaggtgggtccgggacccgattgtatccaatcactcgggcgatctcaaagcaactgatcccgatttacgacaagccgatgatctattacccaatgtccacgttgatgttggcggggatcaaagatatcatgttgatttcaacgcccaaggacttgccacggtttgaagaattgtttggcgatgggcatgacctcggcttgagcttagaatacaaagttcaagaacatcctaatggcttggcggaagcgttcattttagctgccgactttatcggggatgattcggtttgcttgatcttaggcgacaacgtcttttacggcggcggcttgtccaagatgttgcagcgagccgcttcgaagccggttggcgccacggtatttggttatcacgtcaatgatccagaacgcttcggggtggtggactttgacgaaaacatgcatgccaagtccatcattgaaaagcctgaacaccctgcctctaattacgccgtgactggtttgtatttctacgataacgatgtcgttgaaatcgccaaaaacatcaaaccttctgcgcgtggggaactggaaatcaccgatatcaatcaagaatacttacgtcgtgggcaactcgatgttgagctgatgggtcggggatttgcttggcttgatactgggacgcatgaatccttacaaaccgcgtctgcgtttatcgcatcgatccaacaccggcagaacttgcagatttcttgtcttgaagaaatcgcctaccggatgggttacatcgacattcaacaagttgaaaagctcgcccaaccgttgaagaagacggaatacgggcaatacttattacaattagtccaaaacgaaaccaaataatcactgatacaactcagctcaatatggaggccaaatagctatggcattaaagatcattcccaccaagttacaagacgttaagttaattgaaaccgatgtgttcggcgacaaccgtggcttcttcacggaaacctacactcgtgaaaaattcgttgaagcaggcatcaccaatgacttcaaccaagataaccaatccttgtccgctgaagccggcgtcttgcggggcttgcactaccaatacggcaaagatgcgcaaacgaaattagttcgcgtggtcactggtgtcgttgaagatgtcttagttgatatccgtaaaggctcgccaacatatggccaatgggaaggctacattttatctgaattcaaccaccgtcaattgttggtcccaaagggctttgctcatggtttcatcacgttgactaataacgtcaacttctgctacaaggttgaaggctactatgcgccagacgctgaccgtgggatcgcttttgatgatccagatcttggcattgactggccaatgagcacggatcatttgatcatgtctgaaaaagatttgcaccacccacaactcaaagacgctgataacaactttgtttacggggagatctaatcatgaaaattatggtaactggcggtgccggcttcatcggctccaacttcgttcattatgtgtataataatcatccagatgtccaaattgttgtgctcgacaagctgacttatgctggcaatcgcgccaaccttgaaagtatcttaggtgatcgtgtgcaattggtcgttggtgatatttgcgatgctgaattagttgacaagttaatggctgacgtcgatgcttgtgtgcactatgccgcagaatcacataacgacaacgccttgatcgatccatcaccattcttgcattcaaacgtgatcggcacttacaccttgcttgaagctgcccgtaaatacgacgtccgcttccatcatgtctccaccgatgaagtgtatggtgatctgccattgcgcgaagacttaccagggcatggcgaaggcgaaggggagaaattcaccacggaatcgcgctacaacccatcctctccatattcttcgactaaagcggcctcggacatgttagtccatggctggactcggtcgtttggtgttcgtgcgactatctctaactgctccaacaactatggcccatatcaatacattgaaaagttcattccacgccaaattactaatattttggctggcatcaagccgaagttgtatgggactggtaagaatgttcgtgactggattcacaccgaagaccactcttctgcggtttggactattctgactaaaggcaagattggcgaaacatatttgatcggcgccgatggcgaacaagacaacaagactgttttggaaatgatcttaaaagacatgggtaaagacccatctgactacgaacaagttaaggatcgtcctggccatgacttgcgttacgccattgactccacgaagttgcgcaccgaacttggttgggcacccaagtacactgattttgattctggtttgaagcacaccatccaatggtacaccgataatcaagactggtggcaagctgaaaaggctgaagtcgaagccaagtacgctaagaacggccaataatctttgcggtcatggtcgtcattgcagaaagcgaagcgctcggcttcgctttttcgttgaaggagaataaaataaatgaaaattttgatcactggtgccaacggtcaactcggcacggaattacgtcacttactggatcgtcgcggccttgaataccgtgccactgatgccaaagaactggatatcaccgatgctgatgcagtgaatgcttacgtcaaagacttccaaccagacgtcatctatcactgcgctgcctacactgccgtggataaggcggaagacgaaggcaaagccatcaaccaaaaagttaacgtcgatgggacgaagaacttggcagttgcggctggcgagaatgatgctactttggtttacatctcaacagattacgtttttgatggcgattccgatgaattgtatactgttgaccacaaaccagccccacgcaacgaatatggtcgtaccaagtatgaaggcgaactcgccgtacaaaagtatgccaagaagtattacatcatccggaccagctgggtctttggtgaatacgggcataacttcgtctacaccatgttagatctcgccaagacgcatgacacgttgactgtggttaacgatcaatacggccgcccttcatggacgaagaccttggctgaattcatgaccttcgccatcgatcaaaagctcgaatatggcatctaccacttgtctgaagacaactcatgtaactggtatgaattcgccactgagatcttgaaagacaccaacacgaaggtcttaccggtcacttctgccgaatacccacaaaaggcatggcggccacgtcattcgatcttagatttgtctaagaccaaagcaactggctttgaattgccgacttggcaagatgccttgcatgaatttatggcggaaatcaaacagaagtagtgtaagtttgtagcacttatggtgacttcaaagtgtgtgtgacgaagtccatatgtttcgtaagaacatcaatgaataaaggatttaaaacaaaccaggtttaatttgtacttgagctgagcgggggttggaccctgctcttttttgaaatgggggaaaaatatcatggtaaaggttcgcaaagcaattattccagcggcgggtttaggtacccggttcttaccagcgacgaaggccttagcgaaggaaatgttgccaatagtcgacaagctgaagacggcatatagctttaccaggtaatgcgaagtttttgacaccactcggcgaaaaaattgtccaaggtcggcgaagaaattgaccaacaatacagaaacctcctgtatactatgggtagcatacgtgtaagcgcgtgcaattcttaaatacaggaggtctttgtaatggctattcattaccgtcaaattcttgagcttcacgctcaagagctggtgcagcgagacattgcggcaatcactgggaattcacgtcccaagatttctgaagttatcaagcaagctgagctacatcagattagtccaccatttactgatgatgtggatgatatttggttggaaagcttgttgtttcctcagaagcaaccgatggcaaaaggtcggcagatacccgacttcgaaaagatacacgaggaattggctaagcctaacgtcaccttatccctggttcattatgaatatgagcaagagtgccgacaaaatggcacaattccgtatgcgtatcgaaccttttgccagtattatcgtgcttatgcgcagaaatataaggcaactatgcggatccggcgtaaaccaggtgaagtgatggaggtcgattgggcgggctcacctttgcatatcgtcgatcgcgaaactggagaaatcatcaaggcatatctgttcatcgcttctttgccgtgtagtgcgtacagctactgtgaggcatttatgactgaacaacaggaggcgtggcttactggacacattcatgcgtatgaattctttggtggtgtgacgcaatatctgatttccgacaatctcaaaacgggtgtgacttcgcacaagcatagcgaaatcatcttgaatgaaatgtatcgagatctagccttgcactacggcacaattgtgatgccagcacgagtccggaagccaaaggataagccgactgtcgaaggtgttgtggggacagtatcaacatggattatagcagcgctacgaaatgaaacattctttggcctcgaggaattaaataaggccgttcgcatcaaactcaaggagttcaacgaacggccattcacaaagaaatataaacaaggtagtcgcctttcggcgtttcatgacgaagaaagctttgccttgcgaccattacctgttcaagcttatacgatggccagttggcggactgccatcgtgcaattagactaccacatcaacgtggaaagtcagttttactctgttccttacgagtatatctcatctaaagtggatatcaaggtgacgaaagatatcgtagaagttttcccccagtttacaattcaagtgcaacaccctgacgactagaccaaaaaggccatgaagacctattcttgttagtactagctaaacaagaaagcaggaatcttcatgacccactctcagactaacacccacaagcattaccaacaactcagttttagcgaccgtgctacaattcaggcccttcgggctgtgtttaaaacggaatatcttcgtttaggtcaattacatattgagataacagtttaattacttcaattttactcttagttttatgttgctttatcaaatttgaaaagagttcatcacgtaaaatcataaagccctgattagcatattccgaaagcatctctttaacttgtttttgaactttattatcagcaaattttccttcttcaccatccaatataccttctttgatagcaagtgcatattgaatcccaagatcagatttattcttaaaatatgattgtctgaactgtcgaccattaccatcagaagccggtaactttatacctgacttcataccaatagttagaccaagcataaagatctgtgaaatctttaagtctaaactatcatgcagtaaatcaaaaacgtcttcaaactctttgggtgtatgaatcaaatcatcgacatttaagaaatttaaattttccattacctatacctcctttaattcactaaatgaatcaattgcacgaatcacacttttgccatcttgatctttggtgatacggtaaattttactaactttatcttcactagcaaataaattcatttcattttcacctaattcagtatctgtcaataacaatatccattgccgcgcaaatttaggagtctctctaatcatatttgtccgaacaatactatctaggcgtgcaaacggtgtatctactaaaagtggaaaatcaatgtcagatcgtcctcgagaagacaaatctgctaatgcaaaaataaaagacaatgacagtgcttgcttttgccccatcgaaagatcacctaacacattaacatcatcatcatttaacaacgtaagatcatatgttgttgaaatatctaatttctgcaccaagttacggtctatattagaaagcagtttcttaagcatatcaaggattctttctgataattcggttcgcatattagaatcataagcatgtaaaatacgtgttaaaccatctaaaattctttccgttctcttaaatactttttcctttaacatatcttcattaacaagatctatttgtcttttctcgtctttatccaactgctcttgttcactttctaaattgttcagttggaatttaagctcattaatctgtgtatttatggcatctaatttccggttaattgttggaagactatttacttttttatcttcaacattttgaatagccgctaaatgaccagacagagattcattcattttatcgatttgcagcatcaactgttctttcttttttgacgcctcgataagcgttttatatttctcttttagtaaatcagtgacttcactattttctttaacgtgttcattcgcaatctcaatatcttggaatacatccctaatattagactgatgataattatccaataattgcttaacatgtatttcattctctggatgatcacttaagtcattaccgcataataaacagctaccctgctgcaatgacatttcaataatccttttatcaaacttactgtcattttgttcttgaataatactaactttaggcattaccaaattcatagtgtcattccataaaaaactcacgccatcaaataacagacttttcatattgtcactaatctcatcaattaatcgatcttgattaattagttcttcttcatacctatttagctgttttttttgactacttaattgttcagtattagcaatctctaactcaattgcattcttttcatctccagctaatctaagttcctgacttacttcttttaatttattattgactgtatcaatttctgccaagttggactgctttttactttgaatttgatttaattgcaaatctttagattgatgcgcaatctcatttttttgctgcttaatcagttgttttaaaatatcctctgctttttgtacactctttatctgcaatagattttgcacgctatttttaatcttttcagagacttctgccttattcgatgaatccggaaataactgggattgctctgcgtcaaaaaagaaaaagtttctaacataatcgggcatgatcatatttaattctgaattaacttcctcaacattattagagatttgctcagtttcaccgctagaggttctcttagataatgttgctcttgagctcaattccttaatattatcgccatcagcaatttcaatcttttctcgatgaatctgatacataacgccttcgtgttcaaaacaaacttcgacttctgcggtaactggatcaccatcattttcacgtaagcgatctaagttaactaaatgaacagcttcatgccggctctgattatcttgatctaatttttcgtccccaaagagaccaaacctaattgctctaaaaatacctgttttcccagcgccattgacaccaataatcaatgtaacgttttgatcattttttgcaaacgtaaccatttgaggatcataaaactgcctaaagttttttaattgtaaactagtaatttgcatagtctgactcccccgtattcaagtcttcttgaacaatttggattattttattacttatatgatcacgtatttgtttattattaatattcttgttttctatttcacttaataattgtttaatcacaacctgatctgattcaggtaggctattaatctgagtttgcaaatctgtttgtatcattaatttatttctcctcattttgaatattttcattataaatatcgattgcggatttatccatatacgaatctaaatcaaatttggataaaatcgggccaacaatatttcttgcctcaaactcatttttggcatattgacaaaattcgtgaaacctaggtatttctctcttcaccataactttagcagtatcaaagtctatttcgttaacatcgggtaatacaataaaatcatagatatttgcttgcgttttaccagctgagttccgtaaaattcttcctcgacgttgaataaattggcgaggattggtagtactggctaaaaaatacgcttgacgagtctgtggaacgtcaactccttcatccaagcacttcattgctgctaaggtttttatttcaccgagttcaaacttatttaaaatttgagttcttttttttaatctaagaccactatcaaatttcacaactgactggtttaatttatttccgattagttgggtatatttatcaatttgaccatccggacagtacaataagttatatttatcattgtttttattaaaaactttttgtaatccaatttccttatttgccgcctgctgaataacccgtgttcgcttcctgagtaaatattcatatttttctctaattgaatcatcatcattctttaagagctgaccataaattttaccaatacttttagtcaaagtgatatactcttcgttttcttctatcgttaggtatacaggaatggggtaataattatatggtgttagaaagccacgatcaattgcttgtgccaacgaaaattcatagataattccaccgaacaaattaaatattcgattagtcccttcctcatcccaccagcgttctggtgttgcagagagcccaagcacgctaccaaagctcgaatataccgagataatattaattgaacttcgagatcctaaataatggcactcatcagcaattagaaatacatcctcagtacgctttagcaatttaattaaattattaaattcccacttattggtactaacatatgaaccgataattactaatctatctcgtaatccatggttatattcccatatctgatcttgaagcttttgcatccaattagttttattacccgcaattttcacatcgacatgcacgccggttgcagtcagattctcctgccactgaggaattaaatgaataaatggtactaagataattagtacctggtgtttaaccatttgaaaattggcttctgcacaagcaatgctagtaaatgttttccccgttccggttgccatatctaaaatgccacgattgttgtgactttgaaacgcctgaattgcttttttctggtaatctcttaattcaatcatcataatttttcttcatctgaacagcaccaaactcatttacaataaagagagtgtttaagacttgtggaatactagtagcttgtgcattctgtaatatcccaattttattgagataagctaaaacgtccttaactgatcccccaccttgatactttttcatcatggctcttgttaaatccacaatgtctattatttcagattcataaggaacgataataagcgggtcattaggagtctcaagactaccattgtcaacgtcccattctagtaatcgatacttattcgaatatctgatttcattttttagtaattctttagtccacgaaagtttaaaggatcgttcaggtaaacttggtagattatttgtattgagcattatcattaccaaactgataaactcactatcaatacttttggttgaccaaatattttctatatactgattagtaccatctataacttgtctagactgttgccaattaataatatatttagttaatataaatacatccatatcgacttctgtcatatcattatttcctagcaactgattaatttttgcataaattgattgattaagatagcctactgaattgagaaaattggttaattctattcgagtaaatgtcctttccccagcccagtcatcgattattttttcatttgtaggccttgatttaacatacttaacttgagtgaatccttttagatttggccataaatatgttaataaatcggcaaaatagtctaactctgaaaagtaaacggctatccccttagtagctaatagatcattaaaaaaactagatttttccatgttatcttttatttcatgtggaaaaacatatccttcgtgtaattcaaactgtctttctatttcattatcaaaaagttgtcgaacttcttttgaaattttgatttctatcaaagatatctttttatttcgcatccctaataattttgagttacttacttcatgattcacactactcaatgggattccaatatcagaagatattttttctgctgaaactatctttccatgtttttgaacataattaataattctttgttcaatagttgctttctcagtattcggtaatctaattgactgagtgttcacatatccaaaactaaactcatcgggtagtaggaagactaattctgagtataattcaaacttatttctaatgcccgctttaattaattcatcttcaaacttcttatatacgacttctggtctaatttcttcaatatctataagtctattatttatccattgagtcattttcgttaaaagttgttggtcaattttatcatgattggaaatagcatacgtataatttcctaaatatactatttctcccttatcacacaaacgattcaatcttgaattgaacgctcgaacctcatcagtcaagttatcacgcaatatctttttatgaaatgtatgttggatataagtatttaagtaattaattgattcagtattgacctgcagagtgctatcaggttgtttgttaatacattttataatggcttgctcaattgatatctgcttataaaggaaaagactgttttcgtactgaaaatcatacgtcaacctaattttattcaataacaatttaagctcttcctcgtttagaaaaggttcgaagatggtccttatctctttaacagaaataacatcaatactagttaatttctcatcaagttttattaatgtttttctgataggttgctcatcatttaatggcggcaataaaactggtaatttcccaataatacttggtgaatcaatatcatagaggtattgataatcttcactactcatatcttgttgtaatatcaatactctgccaacaaagttagtaaaacagatatattcccgcaatcgatatcgattaccaatttcaattttttgattttttattttttgcttaagttgacgaacacgttctcttgtgacacccactttctgacctatggattcaagagtacgatattccttattattttcattatcaattttgtaaacttcattaactcgatcattattattcaagtaatactgaaaagctcgttgacattttgtttttattttatcagtcataacttcaagatagattaactcatttatgatttcctcattaccattatttgcattcttgttaaattcaattttactgtctattactgcatcacgatattcttctaattgaaatgctttaattaaattaattagttctcctcgagtaatattagtttcatgatgctgttctcttttaaaccaatctatatattccttatatccatcggatatcatttgaagaaactctttttgttttcgccctttaatatttttatcctttagtaaactaacaaactgtttattattatttggccatataattccgtctttctctgctttctggtcagaaaaaataatttttaaatattcatgctgcccaaaaagaatatatggaaaaacaacgtgagcaatttcttgctcttgttgttctatcatgatgaatgatgaaaattctgaaagtttagttcttaagtcatctatacgtttaggacctatccctttcaacgtagtaagcttaataattacgtcttcagtaatatttttaatttgaaatacattcatgccacgtaaacttttttttataaaagtaaatttgttttcacttagaaaagtatctaaattgtcatttgaatcacttgatacatcggtttctatattgttattttcaagatagtttttattatcgtaggttataatagaaaatccagcatattgaaataccttttcggcatcaaatagttcttctatgttgttgccaaaaacatacggaatagcatcgatacatataccatcaaaataactatcgctatccacatgagcctcggaaaaaaattgttttaaagcaataggaaagataatactttcatactttttattaccaaaagaacctgattttaacattcttgtttgttgtgggagttgataaaataattgttcaccatgattcccaaaaaaacgcccacctcgaattgttatttcaattttaagtaatgtaaataatgacggatttactttgtaaactcttctcagaaaatctaaatctacaatacttatatggttctgatatgtatataaaacttggtattctgtaataaacttattaattaaaaaacttctacagttctttatatcccctaaaaacaaaattttattataatacatcccattcatccaccattctcactttgaaccaatttgaagcgtttaatacttaaatataattagattatactaatgtaattagtacagatcaattagtaaccagaataatctgtgggacagtcccagccctcaccctttagcttggcagctacagcttgttcaaatttatctcccgctatttaactagtcttcttttcttttttagttgtaactatttaccaaaacgccaccactttttaggtttaggttgtgactccggggtgctattttcaggttccggttgtttgtctgacgtcacttctttttcaccatcatcatgcggtgccatcgttaaggctttcaagtccttaatttctgccttgtattcttcgagcagttgtttgtcctgtaaggccaatctctgttgctgatctagtaacttatgtaactctttcttttcagattgaatttctgatactaaatttcgaaggaatttcacttcatcttgtccatcaaccgcatcttttttgttgtcgtcaacatcatctttttgttgacggtatcttgttgacgaatcgtttgagagcattgctttaatagctttttgcccatcaacatcaacgtaaacagtattgccttttgttgatgtaaattgacgtaaatcgattgacgcatctctttttatcttttgccatatagcctgctttgaaacgcccaattcatcagcaagttctctaatagttttaggcatgatttccaaacccctttcggagttcagcaagtgcttcttttcttgcttgatctcttatttttttatcgtgttccgcttgtttctcagccaccgcttgtttctcagttgagcctaaagttaaccccttaactttatcaatggcgcgccatttttgatgttctgttagttcactattatgctgaatattgaaaagcttttgtctttcatcttgaaattgcccttgtgagaagtcgtctgcgttctttttttctgatttccaggtaaatgagtaaccaataaccggcttgccacggcctttaccatatttttttctaatagttagacccctgaaaagaggagttagttcttctttaattggctgaataactctggattcaacgtttgcaggtttattccaatagctttgcggaatatcaagtaattcaaaaaaatcacttttagaaaaataagcataaccagtagttcgaaattgtttaaggagacgaaacatcgtttttgcataactactctttaaatctctgaactctgctaaagcatatcgaacccagctttcaagattatttagaagtttcaatgccttggggtaaatttgaatatcaacataagggacttctgccgaacccttgatttcaaatcgagtaaacatgacaaacatttctctatcaagtccatctttacttctagagccaaatctaagacctaatattttttgatatgtactttgtatgtcatcaataaatcgattatttgcggtcggcttatacgcgcttaattcttttaactgatcaaaagtaaaccgaacagtatcatcacctttatcgcgcattctagaaacaaccgaaaagaaaagattcatttctacaggagtaaatcttctcagaggaattgtattcagttctggatcatatttaactaattcattgctcataaaataacctccttgaataatactactttatttgaatacagaagtaaataagcgtagtcgataaacagacaaaatgtagtcgataaagtcctgtaacccttaggagagtaggactaaataggggtctaaaagaggtttaaaagaggtactactgtaccagagccaaacctcaaataaaaaacacaaaggagcgactcaaaaatcggctcacattaaattcaagtcactatgctcccacgctttgctcgtccgctaccattgacagcaaacagttagtttttctgaatcttaacaagagtttagcggctatgttcgtttttaagggtcttatttttcgtttttagcggttttgagactgtttatatatatttataccaaagcaaaaacaaaaagccctcaacaggcttttagaggactaaataacaaaggcaggacgattaataatatcttcttgtcttttttgtaaaatataagtatatagggaatcatacaaattctttttgatctcgtcaggttcattgacagaatcttcaaacaattcttgaatatcaacttgccaaggatcagcaagcatttcatcaattggctttaatactttcttttcgtccatctgagttactcctaacattagctaattacttcaggtttaaattaaaggcatctttttatagttagttattcaaagattgtgattaagtttagaaagaaaaacggtgtaaagcaattaaaaagatttgtttgagcgcagcgaaatctaatacaatttttggggtatcgaaacacgtcaaagttagttgacgtgtaagtgcgcattgaactaaaaaaaaccttttattttaatgatcaagttagctattttttagcgtcattaaacggaatgaaatgagtttaatgcgcacttacacatagaacatctatgtgggtccgcaaaccgagcaaggctcggtcaaggcgcaaaccgagcaaggctcggtcaaggctcggtcaaggcgcacttacactccactaaaaattagtggaggttttgtgcttaaaatctgtctcagaagttgccttcggcaacaactaaaaatccaaataaaactaaccaaaatcaatttgatctaacatagtttcggtactggcttggtctaagcctaaataagctaaagtcatggcttcacttgaatgatttaataagtgcatgactaagccaatattgtaattggattgcgtataaacgcgataagccccagttttgcgcatagtgtgggtaccaaggtaattaatgcttaaaagatcgccgactttgctcatgattttatagaactgtttctccgtaatatgccgttctgggtgttgaatggacggaaagagccattcagattctagtttatgatcaagcagccattgacgatacaataaaagctctgtttgaactggtttaaggtacaaggtattaggcttgcctgtttttcggtcgtgaatgaatgcattttgtttaatggagccttccggattaaagacatctgcttgttttaggcacataacgtcactgactcttagtagcgtcgctttcccaacctgaaaaattgtgtagttacgctgaccagctttgaaattattgagtaaggtatcttgcacctctttgagaacgtttgaacctttgatgggtaagacaacttgttgcatagttttagctccttaaaaaattgatttttagtacaaatttaggaacgatagataacaccccaattgggcgtatgattgtcagaactttgctatcggttgcggagatggagcgtgatatgattatcgagcgtacgcaagccggtaaaatatttgcaaggcaacacaatcccaactataaggagggtagacccaaaagaaaaaaagatagccggaatatggctatctttgaatattctaactctcatactgtgaaggaagccgctgaagctattaaattattgaaaggaatcagccttttaaaaagtcaacaaagaaattctgctttaaatcatattagggtatcacaaatactttacaaatatgttttgcgtcgcagcaaaaaccagcaaattagacttagtatagcagagataatcaatacggcaaaaacaccataagaagacttttcaaacgggacatggacattgattccccaaaagccaaaaataatcgctggaatagtcaaaacgattgatatctctgttagagttttcataatcatgtttagctgatacgaaatcatattgtttatcatatcttccaaatcatccaaatattggctgtaacctaaaataattctatccattgtgtcgcttgtatcgtatatctcatcaattatttttttggtggtaaaatcaatatcattaatagttgtgaaatttttgttaatgaaatccagcgctttgtgattagcgccataggttgttgacaaagctatcatgtatttttgaagagtcaataaatcaccaaacgttggtctgagtggaccggacgttgatatttctgattctaaatcatcaatttttcccttgactccacgaaggtcgttaagcatcacatggaaatctttttgcatgatctttaaaagtacttcctgcatgaaattattgacatcacgtaaaaccatattggataagagttcgggaatgaattttaatttttgttttgtaaaaattatcaacttatttttaaataccaagaaaacaacagatgtcgtcagattatctagatgcccaccttcatgtacctcgggaaacaaaaaacttacgagcaaacttttttcatcgttctgatctatcatcgtgtcatatgcaactcgatcatcaaacgttagtatattgcctattttaaagtcatatttatgttcaaaagattcgatatattctcgttcgtcaccataaacatagacaacagaagagtttttgatatttgattctgacgaaactaataatgtatcttttgttaaagaataagttttcagcattgtaatcctcctgctttatatttttctcaaaaataaatgcgtaattgttgtgaaataaatacgttatcagttttaaaaacattttgtcttatgtatgataacctgccaaaaattttatctcacacattatctagacaatcttgtctccagcttctaatgtattatctaatttataattatagcccctaaattaaggaatgttttagtgaccacctaggatcatagttaactcatagcaaaactcctggtattttacttagaagtcaataaattaattggactgttttactgcggcactatatggcgtttttttattaatgaacgtagttattcaaacttgtaactaattttttaatttcgtcacgaaccttacggaattcttgtagttgttcttctaaagttcctgtggcttgcgctgggtcagataaaggccagtgtaaactcttggtttgagggggaagcataggacatttatccttggcatcaccacataaagtaataactaaatctgaagtgttcaaataatttagatcaattaatttagagtagtggctactaatatctactccatcttcagccataactttaacagcatttagatttaacccatgagtttcaatccctgcactctcgatttgaaactcatttgccggcaatattttttttgcatatccttcagccatttgactgcgacaagaatttcctgtacataaaaaataaatttttttcattctaaactacctataattttaatttgtataacaccatgatacaccataaacttaaatgcaatgctttcatcaacataggtgtataagtatcaaggtcttctatgtactttgtggcgctttaaagtgccattatctgaaaaataggtattaccaaaatctttcaaaatggcccctgttttctccataatttttgaatcaatcattttctcgtcctcgtttgctaaatggccaccattttttagatttattttggtcctgagtggcgctctcttctaaatcattatgatcattaacttcttcttttacaaaaggttttgattgtgtagtcaatgatttcaggtctttgatttcagatttgtattcttctaacaattttttatcttgcagcgctagtctctgttgttggtctaacaagttttgcatttgagatatttgcaaatctctattttctaattgtcggtctttgactgctagttgttcgtctctatttttttaacttcttcgatttcatttaataaatattggttgatatcccatgatttttgtttgtctgtttgtctcttatttgtctgtttttttgatagttttttgtttgtttgtttgtctaccttagaccttataaatcgctgttcttcgatagacaaaacaacaattcctctatcatttttttgtctacttttatttgtcagtgatttaatatgatattgaatggcttgtttagacacatctaactcttcagcaagttctcggattgtttttaaattttcactcatgatctatatcctgccttttaacgattggtagatactgttcaatcgattttttaagatacttagcaatattctttttagaatagtcatcttgtttatctcgaatatatgctaagtgttctttcacgccctttaaaccacgtaactcttttaatttgtcataaagtggataaacatttttctgtaaccctgacaaaatagccgtatccgtcaaatcaatatatgacaacaagaaatgttccatcagcaattttgtatatggacttttcatagcttcatatacgaggtctttttcactttcttcttgccttatcttaccgtcaatataagttggatcatctaacttgtaactaatatcatctgccacctgctttttagtgatatgaaagacgatattatcaatgctgcgtccttttttaactttttcatatataacattaaagctggtatgatttgtgatttctgctagaggttctttcaatactctcgtttcaaagtgagtgaatcgtttgtattctgttatcgtatcagtcatttctcgtaactctttcataccaatttcaggattacggtacctgtcaatttgttcttctcggcgtccacctttaacactatagtgctcgtattggttgtaattcatcgataaccaacgatacaaaataacggcatatttactattcaattcggaaatttctgacaaggcatgttgtgtaaaattggttttgagattaattaaatagggcataatttcaggactaaatcgaattaatacctcatcatgataatctgtccattctacatatggaattggcacaatgctaacaaacttaaaacctttatcttgttcttttttaatctgaaaaaaagcctgtttttgcattttttcaattgcctctttaaaacgactatgcttatcgttgtcatccactttaaagaaagcaaacatttctttctttgataaataaaccgtctgatcctgaggtggattgtcggtatcaattaaaaacaccgctagttcaaacattttgagtggtgtcttatccatcttggcaatggatgtgattaaactattatgttcaacgacttttctttttgataattcattcaaggtctgtacctgccttgtctttgattctggtataatagtcatataaatacactcctttgggtgtgttgttggataagcataaagaaaaacttttagacgggaatttctttatgcttttattataacattatatagccacttattttatttttttgtggctatatacacagttttttgtggttatatacacagttttttgtggctatataatacgtgaatgcattgttattactgtatttataactacgcaaaaataaatctacaattgaattttatttaccttatgaagatgttcaaaacgcgttaaaggaaagtgcgcaaaacccctttatacgtacaaaggatgaatgggtagtgggtaacaatgagtgtaaattaaataaggcacaaaaaaggatgcttaaggataaagaaatatataatcatttcaatttagaaaatattcccagtttcatcaaaacggagctaaacaagatagtgcatgacatcgatgactaatactttaacaccaaacagaaaggggctatgaatatatagggtctataactatcaaatagtccatttttttagtataagagcagtaaaaccagacgtggaaaccacgtggtcttttagttgattcagtaaaagaagccgaagccaaagtgaagacgttggtttcggcttctttggcttttaattgcgggaacgcacacaaagagccaaaaaagattactgacagccatcttctgatggctgccagtaatcttttttaagttcttgttcaaaaggtttgataaaatcaaagctagaaactagctccggtcatgcttgttgcgatcattatcgcgtaagtcttctacgtgggcatcaccactcgtatcgatatctagttcttcgcggccgacgttttcacttacttgtttcatatcttcgtgttcttgtttacgaatgtcaacttcttctcgaacgaccgggcgtttgttgacatcgatctgttcttctttgattgggatcgtgatcgtgtcgtcttctagcgtatcattgacatcggtagttgcagccgcaccatctccgggctttctttcgatcacgatttcttctcgtttaaccggtacgtcgactgttttcgtctcattgacaacatttttatggatatcgactttacccgtcgtcacatcatgcttattgatatccaattgttcttctttaagccggatactatcagtatcagtatctagatcagttgcacgtgcagcatctgatgcatgtaaattatttgtgctagtgtcaccagctgcatgtctgcctgtaacattttcagttgcttgtgttgggtcgtttttataattattgacggtgataataatttttccagctgagatatcatctctatattggtaaagcgggtcgttgtttgcatggtcagcttcttcatttaaacttgaatcgtattcgtacgtatcagcagaaaatgcatctttgattttttcccatagtgagcgatcttcgtgagtcgtttcgacgccatttacgccggttttaacatcgattcctgacagtccagcaaaaccaaaatttgtagctgcatctttgttggtgtaaataatgatatcatcacggctatagccttctctttgcagttgttcgatcacggataaagcttcttctctcgtactgtaacttccaataactgttaaatttctttccaacatataaatccctcccatttcaactatttttttaaatatgcttacaattgcagtataacgaattcagcaaaaactttaaaagaaacagctcaagaacaattaatcgtcaaagctgatgatccagtgaatctttaaaatcttgtgaataacgaattgacataaaaatactcctatactttcattttacggactgaataaaaatagtccatttttttagtataagagcatttatcattgattgcatcattaggattgacgacattgattatgcaagatggtgttttccatattagtgaaggatcaccaattattgcatttttgccagtcattatgattggaattgtcttcggtctggcgatggattacgaagtgttcatggtctcacggattagggagacatacattgccactggagatacaaatcgggctgttaaaacaggattgcaagagagtggtccagtcattattacagccgctttgattatgattgctgtctttggaagttttgccttggttgaagatccaacgattaagtcaattggtatttcattagccagtggggttctatttgatgccttcttggttcgtctgattattattccagcgacaatcaagatattcggtcgtgctaactgggtattcccaggagcaaattactataataagtttaaggatgatgcgcaataaataggtattgtggcattaaaaatattttttttgggagtgattttaatcactctttttttgtttgattatgtcgcatttttgatatctttactatttataaaacaatacgaataattttatttttgaggtaataagatatagaatggcactaacttgtcgtttaatattcataaaaattatgggggaatagctgtgataaaaaccaagataactagtcttgtcgtcattgggttgattttgggggcaggcttagggttatatggcaatattgatgatgatgttatggctgcagaaactgatagtcaaacaactaagacagtaaagcaggcaaaatcattaagtcaacagtaccaatataaagaagcaaaatcagtgttatcggggcacaaaggaacaacagttgatcatctaaaaaagagtattaataagcaacagtcaaagttggtcacgtgggatgatccgacaaaaatttcacatcttttttatcattcactaattgttgatcctggtaaagctttctcatctaagcaggcacagggatacaaagattatatggtgaccatcgacgaatttatgccgatgctgaatcagttatatgataatggctatgtattaattaactttaaagatatcatttcgattgataaacaagggaaggtgactttcaaaccagtcaaattacctgaaggcaagaagcctttaattatatcacaggatgatgttaactattatgagtatatgaagaattctggatttgcagataaattagtcgtcaataagcaaggtgatgttaaaaatcaatataccaataatggtcagaagaaaattggtgattatgacatggtaccgattgttgataccttcatcaaaaagcatccagatttctcatacggtggctcaaagggtgtgattgctgaaacgggttataatggggcgctaggttatcgttcatcaaagagtcaatatggtgatacaaaaaagacacatcgcgaagctaagaaagcgacaaaggttgctaacgctatgaaaaaggaaggttggcagtttgcatcgcattcctggggtcatataaatatgactacggccagtgttgatgatatcaaaaaggacactgcactttggcaaaaggaagtacaaccaattgttggtaaaacaccagtattgattttcccatttggagcagatattggctcatttacaaattatacaaatgataatgcaaagtatacttatcttaagagtagcggtttcagtattttcgataatgttgatgcgtcacagacatcatggggtcaattaacaaatgattattatcgtaatgcgcggataaatgtcgatggtattcgtttacatgaaacaatgactggtgagaacacggttctaaatgacttctttaatacaaaagatttttatcatcgtgataaataatgaagagtgcgagacaaaagtcgtcaacaaaaaattgggttatttttcaaacagttagacaacactatcactcttcatcaacgtaagttagatttgttgaaagaacagaaaaaaggctttttacaaaatatgtttgtatagggtctataattatataaatcgcccctgtgaaaacctattaaaacagcccccattatctaccggttagataatgggggttgtttttttgttaggtgatataatagtacttaaaaaacgaggtcgatgatcacatgcccaatcacatatttatcaatcgagagtccgggaatgataatatttcaatattctatgacgaaccatcatttgtggtcattgcgaataaagatgatctaactagcattcagttgattgatgagtctaaaaaacctggtatctatatattgttaggtgctgataaacgatatataggtcaagcatcaaatgctatttttaatcggttgcagcaacattatattaataagccttggtggaataaattaatattttttggccgtgaagatggccatttatcaaaagcacagttagatctgctagaacgcaaaataattgaaaaaatgaaacgagcagaaatcgaactagataataatacccaaggtaatcagagctatattgataaattaagccaattttctgccttatcattgttatcgaaagttgaacgggtattgatagatatcgcaaatattaacttatttgctagtgatgataccgaatttgatagggtggaccctactccaaacaacgatactatttcgattttatttggtagacagcattatacaggaagctcttaccgagacgtctttattaaattagtatctacacttgttctgtcgtcagatatagctaaattaacggatttaataaattcgactgaacccaatactgtacaaataataggaaccctagagcgcgtctcaggacaaggtacaaaattaactaaagctatagattccagtaaatatcatgtctatgttaatttttcgaaagatgcattgtataaaaagatacaaatattagctaatttaacaaacaataaagtgacctttgaaaggtggtaaattcactatggtgcaacaaatagtcctcccaatcaaagactctaacgtcttaaaaatggtgcaagacaccttactcgatagttttcgggcaggtcgacgtaactacaccatctttcaagttggcaaagccaccctgctgcgggtgagtgatgtgatgacgttaaagaaatccgatgtctataatccagatggctctgttaaacacacggcctttattcatgataaaaagaccggtaaagcaaatacactatatttaaagcccgtgcaacaagacttgctgaaatatcatgattggctggtccaagaaaacatcaattcggattggttattcccctcaactgcccacccagaccgtcacatcactgagaagcagttttataaggtcatggcacgcgttggtgatctattagggataaactatctaggcacacataccatgcgtaaaaccggcgcttatcgtgtctatacacagtcaaattacaacattggcttagtcatgcacttactgaatcattctagtgaagctatgacgttaacttaccttggcttagaccaagcgagtcgggaaaccatgttagatcaaattgattttggttagactaattggatacaactgtaattaaacgcagactttatcttgcggatggagaagttaatgcaaaagatgtatatataaagcatgatttttctaaaaaaacggctgaaaaccttgatacaagcgagcatcacgaaatcagacaccgacaaaaaagccgaaggaatacgaatgttaaaatacgattccttcggcttttttgtatatgcattatttcagcttaactggctttgaatcacaaattattttttgatcaaaaaataattctgtcccagcctatttgtcataaatcggctatttattgtatcgtttttacttagcccaaataagcaaagcagatcgaacccaagaagcctgtcgtttgtcaatctcttctgacgtcattacatttactttacccgcccactttcgagtatcttcaaactttgaattagctataacttcctgctttctagaagaagcatctttaaacgacttagcctctttctttgttatcaataatttattaccgatacgatccttgttctccacattttcattaatataggtgacttttacatcagtcaagaggattttactttcatcatcaggatatgacagctcagacaatatatatttagttgttttttcagtaggaagcgaagctgatttcagggcattctcaaattgttgattatcaaccatttcttctgaaattaaatcattaatatccttaacagtactgattttgccatcgcttagctttctcgcaattgttgcaaacgatttttcaaacttatttgctactagacccccaatagtaaagtttctgattgtaaacgaaataatcttatacaaaacttgtgcaatttctgcttcgtcaaattctttttcaaccataactaaaatcagcggataaaaagtctttgctcccaactgattaagtacatacaagttattaatcaatgtttcattatgaaacgaaatttgggtctttgggtctagcatagaagcaaattcatctgacaaatctgaaagcttctgaaccaatcgcgttgcgtcgctcttagtctccacacttcgattcaaagcacgatacaacttcttctcagtaacgaattcatgtgttccattccagtatgcacgaatgaacttcgtagcccgatcagaattgaaatctaacggagtcatcatttcttcccaatggtgctgtatgtcaggatcgccactagctttgcggaatagatggtttttcaaaaggtcggaactattcaagtcacggccacgagcattcaacgtttcaaagataacaaatgcactcgcttcatctggtgttgaaatcttcataacaaacatgtgatcaagaaatgcatcctgcaaatcttctaaaaattcaaccctatcgtcaatcgtattaaaatcctttattcgtgcacccacacgcttgtacaaataatcgtaagctttcacaaaattgtgctcactgtcttggccagcttgcccctttacctcgctaaaagagaacgcgtcattttgaatcaatcgactaaaaaattcagcaacttgttcagattgtgtaaagttatagtttcctcggcgaccaatatacttcttttgaaggtcttgcgcacgcatacgggctcgttctgaatccaaactattaaaactatctcgtaatacggctaaaaacattgttgacgtcgtcactcgctgctgcccatcaaccacatagtcacggctatcaagcttattagttacaacttgccctaagaaatgatcatcttcattctcatctaagacctcaaccaaatcgttccaaaaatcttcccactcctgatttgtccaagcataaccacgttgataggttggcacagctaaatttttattatcagaaaataaagtacctaacgtaattcgttcaaaactcatttcagccatttcaatactcctattcttataaataatatataaatttaattagatcacattgtttacaagttcgctacgaaaaagcaaagaaattagatattgttctcttatgatgagattctatacttttttgtaagtatttcataatgaaatacatgaaatccaaatggccattgacaatgaatgaaaaatatccactcacacacgaattaaaaagcaaacaaattgccgcaagtgacaaagcacgcgaagtcttaggttggacgccacagtatgacaatatgaaagcaattattgaaactgcctggaattggcatttaaatcatcccaacggttatacagaccgcggttaatgatgaaggaacacgccagaaattctctggcgtgtttttttatggcctaatttggacatgcgtcattgtttttgttataatgaaaccactattgaggaggcactaacttatgcaagtattgattcttgttttaacttatctaatcgccgttgaacacatcggtatcatggggctagaaatgtttgccagtgctgaaacaaaggcgaaagcttttgacatgccgctggactttgtcaaactaccaaatgcccgcgtggcactggccaaccaaggcatttataacggaatgttgggcgccgtaattatcatggtcaacctgttattagccggccaaacgctcaagattgtcctcgccctattaatgctctacatcttcatcgttgccctttacgggacatttaccgccaccaagaaaattttcttcttacaaggcttacccgctttaatcacattattgttaatcttattcttctaaaaaagagctttaatcatgacaaatccaagaacgtcttcaaaaacatcggcgcttcattgaaaaatgtcgtcggtggcgaaatcaaagcctatactgaaatgatgactgaatcacgcgatgtagccatcgaccggcttcgccaaaatgcacttgaaatgggcgcagatgcggttgtcacgatgcgctttgattccggttcaatcggaacagatatgcaatcagttgccgcttatggcacggctgttaaatatatcgactaacaaaaaaagatgaacggttccctgatattcaggaaatcattcatcttttttaatttacttattaattctaatcaacaacttaagccgctggtgctgcgggttgtgcgctatttaaagtccacgtaatgttgctcgagaatgtatcaccagccgcaagttgaatacttggattggcacttaatgctaatttcccagcaacttgccatgttttcgacatcttatccgtcataatcggtgtttcagtaccattatcagataatcctacgttcgttggcaagccagtcatattaatggctgtgctgcttaattgtttgcctgtggttgatgccattttactcatcttcgctgtcaatttccaacctggcgttgctctaatatccgtgattttcaacccatcactgacctgatattgcttgtcctgagcagttgtaccaacataaatatcttttgataagacgttcccagatctaaagctaggcacttgatccaatgacaacttaccaactgctggttgcgcttgtaattcagcttcgttagaaacaatcgtaactttttttgaacttccacttgattcttccgttacgttagtcgttaatgttagctgtgctcgataactctttccagccgtagttgcagctgcagcatctttcatgaaagtactatctttactaaaggttagtggttgttccgtatttaagttcgctaaatttgtaatgtcacccttaagattagaaacaccactattagtagcgggggttattgtcttatcctcaccatctgtaaattgccattcataatgccaattactcgttgaaccagatgccttagctaggtctgacaaaccatcaactgaccaagtcccaccgagatccgccgctttcttgtaggctgctaacccaccaacataaaccgttttctctttagagacattccctgcagcaattttatatttagctggaatccctggtgtattcggatctttattcaattttccagtataatacaaatctggcttatacttttcaccctccacatcaatcgcttcgttaactttattcacttatttcgtgcgtttaatagtaaaatgattaagcagttggtacagttggtgttgttgatgaaagattccaattaattgttgttgtgaaactctcatctttagctaaatcggctgctggatttgctgctaatgttaacgtagctgcttccatcttgaaattatcgacaccatgtttcccgttacctttaaccacttcaacggcaggagaatcgtccttaacagcacctgttaaagtttcaccaagtgaaccagtagaatctaaattcaatattgcgcctgttagtttattagcatcatctgtgaattgagccatgtcagctgtcaacgaccagtcagatttgcctaaacgtatatcagcaatttctaaagcgccagctgttttagcaactttaccagtaaaaccagcataaatcgcactagcttcaattgtcccaaagctgaaacttggtactgattttaatactaatgtcccattttcaggatctgttgggtttgttggatccttagcaacaacactaaagtcggcttttgatgtttgcggagcaactgcgtcagctgatactgaccccactgtcattgctgttggtgctaccattgttgctaatgctgaaaataattttgtcttcattgataattcctccaaattattattaattacatttaatatagtagcacgcaattcaattgccggataacaaaaaatagataccatacggtatctatttttacccttcactaattattcgttaaaccgattccaatcctgtcctagcagttatttccccattaccattcttctagtgtaaacagcttgcccggaatgcatgaccgcatcatccacgattgagactaagcgtgcttcacgggtaactgccggtgtccaattttcatcaattatctctaataaagactcgtcagtaacttcagccaggtaatcaagcgtcaattgcaatgcgtctgctaagtaaccaattaataatgctttatcggtgataatcactttggctgcttcttctggtgaatgcgaccaatcttgcgtttcatcgggtagatctaatgcaaatttttgtgaccaacctgcacgtatccacaatggttgtatccctttcaaatccgcaatctgataatccatttcacgggcagtatgccatactaaccaggtcaccgatttaattagtggctgcggcattgtattggcctcagccactgtcatttgttccaatgtatcgagtaatcgttcttgagcgcgttcgaccgttgcacttaatagttgcgttgcatgcatcttatcatcctccatatctaaaagttaaccccattgtatcattaaaccactactaggcttttttttatgaatttaccaaaccattacgaagctttacactttattttcactagaacaacaaacactttacattatttgtttatgcttaaccttgtaaagaataaaaaatcgttttacaaggagcaatcaatatgcgcatgagccaaacaatcatcccttacgtggcaacaacaactttattacttttggcagtcggctgtaccccacaaaaaaatgctaaacaatcgacagctcatcaatccacccttgtccctaaacaaaacatgagtcgccacattcaattagccggtgcgattaatactcgtgatctaggtggaattgtcacgaaaacaggtgccaaaattaaagccaatcggttaattcgttctggtgaattagctggtttaacaacgaaggataaacagaagttaaccgttggaaaacaattaaataacatcgttgatttacggactagtagcgaagttgcggctaaacccgatcccgctttaagcaacgtccactacaatcactatgatgtcaccaagtctttagggacttcggcaagtcaagctgactttttcaagaatctcgataaggttgatggtgaagttttcatgattgatattaaccaaaaattggttactgatcccgcagcacgcacgaactataaacagttctttaatgtcttattgaataataaaagtggtgcgacactttggcattgtacagccggtaaagatcgtgccggattcggtactatgttagtcctcagtgccctcggggttgatcaaaagagcatcatggacgactacctcgcctctaataaatatcgccgcgccgaaaatgaaaagacaattgaacaaattaaggtggcaactcacaataaccccaaagccgttaaaacgatcactgcaatgatggccgtccgtaaaccctatctacaggtcgcatatgacacaatgaacaaagaatatggtggcgttaatggttatttgaaacacgggctgggtttaactaaggcggatctcaaccaattaaaaacgatgtatcttaccaagagttaatgcttcatcaggtagattcactattctcgtctctccatttttttggtatactgctccttagaatcaatcagttaaaggagcctcatcatgtcacctgctcaacatctcattttattattgatcgtgatcattgctgcaatcggcgtcttaagttcatcagtcatcttattcatcgcccaacaaaagaaaaatgaccaacttaagaagaaatcgaatgtgctcttttgggtcagcatcctcgtgatgatgatctttctgaaactaatcgatatgcttcaataaacaccaaaaagcatgccagtcaaatttgactagcatgctttttttgcaatctatcttctaaaaaaccacccttaattctttgctaaattacaaaacttggtctaagcaattttattgttccccacctttgaggatgttatcttaactactaaaggaggtgtcactatgaaaaccttagacaatatcgcgcttactttattaatcgttggtggtttgaactggctacttgtcggtctattcaaattcgacctagtcgctatgttatttggcggtcaagcagctattatttcgcgcatcgtatatgtccttgttggacttagcgcattatattgcattaagttatttgcacccatcaacagcgcgcagcatgaatagctttctggagcggctttttatagggaccaaacatcctgctcgtctcaatcgctatccattaacgtgttggtaaaactgttatttcttttcaataacgcaaaaaagcgtgctagtcagcctcgactagcacgcttttatttttttatttacctttggtatcttcatcattcatcttcaaaatggacatgaacgcctctaatagacacgaaattgcaacacttacgagccaaatggccgcctgatttaatgcttttcagggttcaaataagttattaatcgcgattaataacttatttgaactgtggaaggtaaacgcggttctgaatgtctcttgaaatctgtctcaaatattgacttcaatccaaattatttaagagtagtccaatatttttataagtcataattctagtccgcttttaaaatagtagtgtactggctaaattcctctaagtgttgatggctaatctggttatctgtaatgatggtatcgagttgatctagattatagaagttaaagaaatcgtatcgatcgaatttagtactgtctactaataagaatttttctacagcattgtttagggcaagttgttgaatcacaccttccttgtcactatatgtagcaatagaattatgggtaacagcatttgcactaacaaaagctttggcaaatctcattgcttttaaatttgtcgaagccattgaacctacaaaagctccagttatttctctatattcaccgccaagaagcaataaatcaatggtttcgctatcatttagaatcaagaacacagggagactatttgtaatgatacgaattttataacctttacgacctttcaattctaatgccagttgttcaactgtagttccgggtccaataaaaatagtatcgccatctttgattaaagagcaggcttttttagcaatgtcaattttttcttttgtatttagacttttcttctcgatatgtgtcttttcaagtggctttttagaggaaagcaattgtgcaccaccatgagtacgtgttaaaagtccatcagcttctagagcatcaaggtctctacgggctgtcatatcggaaatatctagttcatctattatttcttttatggttatggtcccatcaatctttaacatatctaaaattttttctaatcgtcgttttttgttcatatgaagactcttctttcataaagtaatttttttccaaagataattctcttttaattgtatcataaaagacaatgctttcaatgtaaaacaaacaatttcaaacaaaaacaaacgttagatgatgaaataagaacagaggattgacgtatattagcttaggtcagattttgtataagacgaaaataaagcaggacctcttaatcagtaaattataggaattaaaagacttttgtaatacttgaatagacatttcacgtccattttgtgatggattaaatgaacaataatttaacggtgttatctatttaaaaaaaacaaaagataaacaaaaaacaaacaaaaaagcgttgctttttgtttgaatgtttgatattttataaacaaagagatgatgaaaacgttatttcgaacatttttcaaaatattttctacttctacgtagcatttctttttaaaatttaggaggtagtctaaatggctattgttgttggtgcagatctcaaaggtacgagattaaaagatgttgtgaaaaattttcttgtagaagaaggttttgaggtaattgatgtgactaaggacggacaagattttgttgatgttaccttggcagttgcctctgaagtaaataaagatgagcaaaacttaggtattgtaattgatgcttatggagctggtccattcatggtagcaactaaaattaaaggtatggttgcagcagaagtttcagatgaacgctcagcttatatgacacgtggacataacaattcacgaatgattacggttggcgctgaaatcgtcggtgatgagcttgctaaaaacatcgctaaaggtttcgtcaatggtaaatatgatggcggacgtcatcaaatccgagtagatatgcttaacaagatgtgttaagaaagggagttaaggaatgagaatcgcaattggatgtgaccacattgtcacagatgtaaaaatggcagtatcagaattcttgaaatcaaaaggacatgaggtccttgatttcgggacatatgaccacgtacgtactcactaccctatctatggtaaaaaagtcggtgaagcagtagtaagtggtcaagcagacttgggagtatgtatctgtggtacaggtgtcggcattaacaatgcagtcaataaagttccaggtgttcgctcagcgttggttcgtgatatgacgtcagctctatatgctaaggaagaacttaatgcgaatgttatcggttttggtggaatgattactggtggtcttcttatgaatgacatcattgaagctttcattgaagctgagtacaaaccaacagaagaaaataaaaaattgattgcaaaaatcgaacacgttgaaacacataatgcacatcaagcagatgaggatttctttacagaattccttgaaaaatgggaccggggtgagtaccacgattaaggtatacccaatgattctgacagtcacactaaatccttcagtagacatatcttatcctctagaaacattgaaaattgatacagtgaatagggtgaaagatgttagtaagacagctggtggaaaaggcttaaatgttactagagtcttgtatgaatctggtgataaagttactgctacaggtttcttaggtggtaaaattggtgaatttattgaaagcgaattagaacaatctcctgttagtccagctttttataaaatctcaggaaacactagaaactgtattgctatcttacacgagggtaaccaaacagaaattttggaacaaggaccaacaatttctcatgaagaagcagaaggctttcttgaccactatagcaatcttattaaacaatcagaagttgtgacaatttcaggaagtttgccttcaggacttcccaacgattattatgaaaaacttatccaacttgcttcggatgaaggagtagcagtcgttttggattgttcaggtgcacctcttgaaacagttctaaaatcgtcggctaaacctactgccatcaaacctaataatgaggaactttcacagttgcttggaaaagaagtaacaaaagatattgaagaactcaaagacgttcttaaagagtcactttttagtggtatcgaatggatagtggtctcattaggtcgaaacggtgcctttgcaaaacatggtgatgttttctataaggtagatattcctgatatcccagttgttaatccagtcggatcaggggactcaacggtagctggtattgcatcagctttaaatagtaaaaaaagtgacgctgacttattaaaacatgcgatgacattgggtatgttaaatgctcaagaaacaatgacagggcatgtgaatatgactaattacgaaacactaaactcacaaattggagtaaaagaggtataaaaatggtacttacagaacagaaacgcaaatctttggaaaaactttcagataaaaacggtgttatctcagctttggcatttgaccaacgtggtgctttgaaacgtttgatggcacagtatcaagatacagaaccaactgtagctcaaatggaagaactaaaggttttggttgctgatgaacttacaaaatacgcttcttcaatgttgcttgaccctgagtatggacttccagcaacaaaagcattggataaagaagcaggtcttcttcttgcctatgaaaaaacaggttatgatacatcaagtacaaaacgtttgcctgactgcttggatgtttggtctgcaaaacgtatcaaagagcaaggcgctgatgccgttaagttcttgctttactatgatgtagacagctcagatgaacttaaccaacaaaaacaagcttatattgaacgtgttggttctgaatgtgtcgctgaagatattcctttcttcttggaaatccttgcttatgatgaagaaatctcagatgcaggttctgttgaatatgcaaaagtgaaacctcgcaaagtcattgaagcgatgaaagttttctctgatccacgctttaacattgatgttcttaaagtagaagtaccagttaacgttaaatatgtcgaaggttttgctgatggtgaagtggtttacagtaaagctgaagctgctgacttctttaaagcacaagaagaagcgactaaccttccatacatctacctaagtgcaggtgtatctgctaaattgttccaagaaacattgcaatttgctcacgactcaggtgccaagtttaatggtgtgctttgtggacgtgctacttgggcaggatctgtggaaccttacatcaaagaaggtgaaaaagcagcacgtgaatggttgcgtactactggattcgaaaatattgatgaacttaacaaagctcttgttaaaacagctagtccatggactgataaagtatagtaaaagccgaaaggttcaaccttttttgtagtaattaaataataagttgggagaaatcagcatgattcaaaccgtaacagaacagaacatcgcaagctttgttcaaacacaaccgttagtgattttagacttttgggcggattggtgtgcaccttgtcggattatgacaccgatgattactgaactacatgaacaattagctgatcagtttggcttaggaaccgttgatgtagaggatcaagcagcgttagctgaacaatatgcgattcaatccgttccaaccctattaatcttcaaaaatggtcaggcgacagaaaaggtaactggcgcttttccaaaagagaagttaaaaagatacttagataagaaaatcgctgaaatgtaatcagcgcattaatagtagcccgcaactttcattggagagttgcgggtcttttttgataagtagaaataaaataacccccttagctattgtctaagggggagatgattattgacgaaccatgtggataacacgttgataaaggattaatgcgccaatctcacaaagtaaaatcaaaacagctaatggaagataggtataactgcccatcacgccaactaatggggaaagaaaaatgccgaaaacatacataccaagtccaagcactgaagaagcaatccctgcatgttgtccttggcgttgtaaggccagtgaggtgacaacggcattaattagaccaagtgttgcgaccactaggaataaaccaattaaagctaaccagagacgattagagccaaagccactaattaagacgcagatggcaccgattaaaccaccaattaagccgatttttaattgttgtaattcatcaaaccaatggattaaaatggtggacatttcagccattaagataatcccaatcccattgattccgtagattagactgaaagttgatttagaaagactaaagacattttgaagcatgaaactggaacctgaaatataacagaacattgccccataaacgaggccttgaattaaaacaaataggatgaatgggcgatctttaaaaatggcttgaataccaaggcgcgattgttgtgccgattgcgcgcttgtggatactgtgtgtgtttctttgaatcccaaaatgatgcctaacaatagaagaaggccaacaatccctaaaaagccgaaaatgccttcccaagaggtgaaacggagcaaagcacttcctattaatggtgaaatgatggggaagataccgttgattgccatgagtaaggcaatgaattttgtcaattgtttaccgtcaaataaatctttagcgactgctcgagtaatgacctgtcctgcagagctcgctaacccttgaataaaccgtaaaaggaagaatagccaaatattgtgggtgactaacgataatagacacgctgtaaaagcaagggcggttccgattacgagtggctttttacggccaacacgatcgctccaggcacccatgaagatggggccaatcgcaagtccagccaaacacatggttagactcagttgaatcatggaagcagatgaatgaaaatcagcttccataatcggaaatgctggtagatacatatccactagtaggggtccataagcactcagtgaaccaagtaaaacagataaccatagtgttcttttttttgttaaaaccatgttaataaaccctcctaaataaaaaagtgtaaaaaaatagcccgttgaaaacgtagctagcgccgaacgaatttaattaattactattcatgttgcttcttagttacactaacataagaagtcgggtttgtggcgatatatgagcaatttttaatatgtaaatggtttctatttcagtttaaacaagttatgatggagataatgaaaaaagttgtcgaatgaggttttgccatgaaaattgcccaaaaaaataaaatattagaaacctgcctaattgcgggacggattatgattgaaagtggttctgaaatgtaccgggttgaagatacaatgaaccggattgcttataatgcaggcattcaaaagagtgttgtgtttacgacaccgaccggtttatttatcggaattgaaaatcaaccttatgtgcaactaggcgctgttgcggtgcggacgattaaccttgaaaaagttgaaaatgtgaatactgcttcacggcaatttgcgactaaggaaattacgttggatcagttaatgttacagttaaaacaaattgatcaggatacagctcattttccgttgtggttacaaattacagctgcagcagtcatttcagcgtttttgatgattattttttctggtgaatatgattggttagatatcataccgtcagcggtagccggtgctttaggctatgccgcctttgcggcggtcaatcgggtcacaacgattcgctttatcggtgaatttttaagtgcgacagtgattgggatagtcgcctatctattaactaggtggcacttaggagtcgatatcgataatattatcatcggggctgtaatgccattggtacctggtgtagcgattaccaactcgattcgagatttgctagcagggcatttattatctggtatggcacgtgggatggaggccatcctgagtgcctttgcaattggaacagggattgcgctcgtatttagattctttatgtaaagagaggttcatcagatgccatattgggttcagtttattattcaagcgttatttagttatatttcaacggttgcgtttggaatttgtattaatttaccaagacgcgcattattatggtgtggctttgccggtatggcagggtggcaggtctattggatgctctttaactttggtagcgggcggatgcttgctaatttgttgggtgcgttagctgttggaatttgtggcaatattatggcccgttataagcggatgccggtgattatctttaatattccagggttagtaccattagtgcccggtggaactgcgtaccgtgcgattcggaacctcgtgctaggcaacttaaatgaagcttcgacacaaggtgtttcagtgatcatgattgctggtgcgattgccgttggctttatgttagcacaaattttagccgatataacacgcaaacgagcgattacgccgaaatgggtatcgcgtcactaaaaagtatgctataataagtctatgcgatgagtcgagtaagtctcggtaggcaactattctgcgaaggcagctaggagacccaaagatacaggataccacggttattcatttaaccacttgccgtattgcaagggtgttttcgcccgctgtgttgtggagcacaaggtgtttattcttcggaatactgtaaaaaaagccccttccgtcaggaaggggcttttttttgtgcgttcattttcttgcatgacagcgttactgatggtgcgatggtcgactaattcaccaatccgttttagatgtttgagatgtgcatcgtagtgttccgaaaaaacgggcgcgtataaaacatttaataggaagatgatggaggtattaatggtaaagttgccgattttcgagtagagtttttcgcgggttgtaatcggtaaaaagcaagtgcattcttgcgaaagtcgattttcaccgatactggtaatcgcaatcgtcgggatgttgcgggcgcgtaaaatagtgttaagtgctagtaagttgggattctcgccagaataggaaattaaaatcgcacaagcatccggactaagattataggcatcgtagttttcctcgccacgaaccgcagatagcgtaacgtttttttggatacgattcattttgagggcaaaatcttgcgcgatgagtaagtttgagttttgggagaagatttgaatatgatttgccttgaggagcaatgatttagcttgactcagatggtcgtggtcgagtaaaaagaagatatcatcaatcgtcattttgtccaagaccgccattttcttacaaatagtcatcaaactatccgtactcgaaaagggcagattgggatcgatacgcgtaaaatgtttattgaggtagcgccactcttctagatagtgtttcttaaaagatttccaaccgtcaaaatggagttttttggcaatgcggaccagagtggacggttgcgtataggtttgagcagcaatttcttggatggaaagctgatcgagtgcttctggagccgttaacaagtaatccacaaccacggtttcagcgggggaaaacgcgaatgtctctagtttttctttaattaacatgtaaccgcctccttttacaaaagattagcgatatacttaaagtttcgtccaatatttggggttcacttcattaatcttaaaaacagattaaggtgatttttttatgctcagttactaaataccattttgaaacgcgctcgtcgaagcaatgccttacgtttagctacatcagtcaaaccactgactgcatcagttattcgcctgcttaggctaatccgcacgcactacccgcttagtcgcccacttttcttaaacttgttgtttagctgggcgaattaagacttcactaaccactacatgttttggttggtcaatcgcatataagactgcgttggcaatgtcttctggattgagggccaacgctgattcttctggtgcatccattaattgcttaaccccttcgaaaacagcagggttgccaatcgtattcaccaattctgttttaacagcccctggtgaaacaattgttgaacgaatgccgttatctttttcttcttggcgtaagccttccataatagcgcgcactgcatatttagtcccgttataaacggcagaagctggataaaccacatgtccggcaaccgaatcagttgaaataatcaaaccatcttgttgggcttgcatcgttggtaagaccgcaccgatcccgtttaaaacgcccatgatgttgatatcgagcatcttttgccattgatcataatcgcgttcgctcaggtttccttgtggcatgacgccggcattgttgtataaaacatctacgcgaccgaaatgatcaagcgccaattggactaagctcgccatttgatcccgattagtcacatccgttgcttgataaatcgcatttgcaccgatttctgatgctaaagcttgtaaacgatcttcacgacgagctgctaaaacaaccttagcccctttgcttgctaataatttggcagttgctgccctaatccctgatgaggcacctgtaatgatcacgactttattttgaattgacatgttaaaactccttttctaatttgatttgacgcatgactttcgctggcgttccggcaacaatcatattgtctggtacatctttggtgaccgtggcgttagcagcgacaatcgcattctcaccgaccgtcacccccggtaaaatcgttgcgccggcaccaatccatgcgttctgtttgatatgcacgggtttaacgaataaaccgcgccggtcaggcttttttaacccacttgatttgcgaaattgcttaatttatgtccgttgctttcccaaaataggggctctataatgcatattgaatcttatctggagatcttttgatgatggaaaaaactgaaaaaatcgcaattttagaaaaactggtctcaattgatacaacagaccaagcagaaggtgtgattgccgactacttagccgatctattcgcacaacatggtatccatactgaaaaagtggcttctaaaccaggccgcgaaaacttagtggcctatctaggcgaagcaaccgacaaagtcctcggtgtcactggtcatatggacgtcgtcagcatcggtgatcgcagcaaatggacgagtaatcccttcactctaaccgctcgcgatggtaaactcttcggtcgaggcgcaaccgacatgaagtctggtctggctgcgcttgtgattgcaatgatcgaattacacgatgaacatgttcctttaaacgaccaaatcaaactactcgcaaccgtcgatgaagaaaagaacgaaactggtgcgcaaactttaaccgctcaaggctatgccgatgatttaacagccttattagttgccgaaccatctggcgttgataaacaagccttggcaaataaccccgataaattccccacagaaatggcccaaaaactccttgcggctaatcaaaccaatgaacaacatttcttaattttcgcccataacggttcccttgattttaaagtgacggcaactggtaaaaccgcgcacagttcaatgcccgcactcggtattaacgcaattgatcatttgcttgcctactacaatcggcaaaaacaatacttcgatcagaaacatcctattgatgatgtcctcggcgatatcgtgcctgtcacaaccttaatcaacggtggtgaacaaattaattcggtccccggtcacacagaacttacttgtcgggttcgtacaacccccgccttaactggcgaccaagtgattgctgacctcaataccatcattgcggaactcaatcaacaggtagacatgaatctggaattgaccgtcattaataaccaaccacccgttaagagcaatccacaagcaccattcattcaagctgttcaaaaaatcggggcacaaaagttatcccaagcttatccactgatgcacgttgctggcggtaccgacgccgcccaccttgctaagcacaatcctgacttacctgtggcagttgtcggccccggcaatgatactagccacatgattgacgaatatgttgatgaagaaatgtacctcaaacacatcgacttctttaaagccgttatgctggattacttaaaataacaacacaaaaaaacatcacctaatatatgccctacttaagagcttatcggatgatgttattatttaatcgtgatacgccttcaagctatttttaagctaaggcagtattgatttcttgtgctaatgtttctttccgttgtaacccaaccatttgttgcactaattggccatctttcatgaccaacaaggttggaattgattggatgccgaattcagccgccaagttttggttgtgatcaacgtcaactttggcgattttagctttacccgcgtaatcgtcggctagttcttcgacaattgggccttgcatccgacatggtgggcaccatgttgcccagaaatcgactaatgtgaccccttcttgaacttcatctttaaagtttgcttcagttagaatttgtgttgccattgcgatcacctttcttttcaagaaaatcattcaacgatttcattgaattactcataatataccaccattgggacgtgccgtcaaaaaggacgcttcatcttattccgtttcggtcataactcgcgaccattcccacactgattgattaaacgttgccactttaaacccagcagcttgtagttgttgactggcaacattggcgtaagcacatagacgaccacgacaataaaccaccacttctttatccttggggagctcagctaatcgttgatccaactgatcatacggcacattgcgtgcccctggtaagtgttgacttgcaaactcatctgcgggacgcaaatcaatcaaacacacatcgtctgccattaatttcgttttcaatgcgtcaccagttaacgcttcgggggcacctgtttcttgcgcgagtgttttttccaaaatcgtcatctctggcaaagtttcttcgcagacatcaaccaagagggttaccaattgtttgacccgttctgaatttaaacgataagtaacaaaattcttctcgcgttcaatcgccactaagtttgtttgtttcaaaatttgcaggttccgtgaaacggtagcgacacttaagccgactgtactggctaagacttccaccgttttggggccttgcgcaagaatgttcaacagttgtagacgcgtcacgttccctaacgacttcccgactttgaccacctgctcataaaccgcatcccggtattctgtaatgcgttcatccactttcatcgcctcccaacaatcaacgcctttattgaatagaatcaatttaacatttctagacaagtgggtcaactaaacaagctaggcaattaaagtaagacacctcagttaattgctttcttcaaatcaacggtgccctgattagcttctttatctgtaatttcaaaaattagtataaattgccactcttgaccgactttatcagttacgttcatttcagtatatttccctatctgaattcctaattaaatgaactaatgtctaaaataaaaaaagaaccaccactcaagctatgtactagggtcctgtcaagttgccggatgaaataatataaaatttctacaattgaattttatttaccttatgaagatgttcaaaacgcgttaaaggaaagtgcgcaaaacccctttatacgtacaaaggatgaaggggtagtgggtaacaatgagtgtaaattaaataaggcacaaaaaaggatgcttaaggataaagaaatatataatcatttcaatttagaaaatattcccagttccatcaaaatggagctaaacaagatagtgcatgacatcgatgactaatactttaacaccaaacagaaaggggctatgaatatatagggtctataattatagttacgcccctagccatcaaacattgaatcccaagtcaccattgatgggtcggcggattgcatttctgggatcgtcaattacggccggtgcgggtgcactggaagatttgttcgtcgattatctcgtcgcgacggatggcgtgattgccatcaaggaagcggtgagtggcagcactttagcaggtaacgcaccagatagctatgtgcagcggctctatcatcggattccagtgacccaaccattggacgcttttgtctgccaactttcaaccaatgatgggcggcatgacaaggctatggggcaagttacgggtgcacaacagcgccacggctttgacgaaacgacgacgctcggagcgattgaaacaatcgtggcctatgttcaacagcattgggcggtgccaatcgtgttcttcacttgtgtgcgaaaatacgatgcgaattatggtaaattagtgcagcaattgaaagtcttacaaaaaaagtggcacttcacgattattgacctctggcaagatccagtggtcaaagctgaaaatcgcgcccaaccactagcaatggtcgacgacgctcatccaacccgattaggttatcggaatatctggacgccaatttttcggcaacaattaacggacgtgcttcgccagtcggaaccataatcgtcaatcgatttcgcgttttcaaggcttccgtcgatagtctaaagaaataaacataacgaccggatgaacctgtcatgtgataggctcatccggtcgttatgttttagcttacttcaaattttaggttagtctgcgacttcaatcttcccaaccgcaattggtaaggtgacgtgtgcatcgtaggcgccaacttcaccagcaacggtggctggtaaagccaagtcttgtggtacgccgtgaatgtagatgacccgtttgtcgagttccaagtcatcggtaccaaagacttctttgaacttcgcttgcaaatcagctaatggcacatcgatttcgtaggcaaagtggccttgggcgtcagcgactgggtagttatcatttggcacgtccatgtgatgtggggcgttgtcaaatggcaccatcgttgtccctgagactggttcagtttctggcaagtcgacaaatccgtcatgattggcatcctgcgccatcgtggcaatttgggccgccttaccatctggaaaaccgtggaaatgttcccagtgttgcgtatttgcaggtgtatcaaacatttcaatcgccacgtgtaattggtcaccgtcttcaacaaaggtggcagttccatggggtgccgttccaataccttctgcgtttagtggtacgatgttagcaacgtattttttagtcatgaatgattcctccaattcttcattataagtccattatatgctattctaaacttattaaaattgatatatgtcaagaaaggaaaatttatgcactggggcaaattctataattaatccgaacagaaattaaaaagcccaaagcaatcacttacagatgaattaatcaataagttaccaagtaatgttcaacccatcactcattccgatcaaggatggcattaccaactagattcctatacaaaaaaattatctgaacatgaatttatccaaagtatgtcccgcaagggaaattgtcatgataatgccccgattgaaagcttttttcacctttataagaccgaatgtttggctggattcccaccgtgtaaaggcttagccgaattaaaagcagtttctttagaatatgttaattggttcaattaccgacgaatctcatcaaaaacaaagggtatgtccccgtgtgaatatcgagaacataccttagcggcataataatatttacttttgtctaacttttgtgttgcacttcatgcactttaaaatgactcaaggctagtttttatttgctactgagccatcgttaatgatggccattttgttctaaagtacattcgtgatgacgcaatgattcaccggtatctcatccagatactaagccttcttctctcgaatggagcccaccagatcatctgtagctggagcgttcgcaagcaatgcgcgaacatcatcaagattcaccttaacattccaaactaaaacaccaactaacttatcggtatctatgaaatagacaagcgatccatgcgttcgccgatcaaaaatcaattgcaatttaggatcaatattaccgattgcttgccaggaaatatcaaaaatcatggaatagaagtatggggtatgctgatagctcatgtgagcacccgccatattacggccaactaattcaccagaaagtcgggcatggtccacgtgctcaatccgttgccgacccaagatgtgatctggataagaggcaatatctccagcagaccagatggctgggtcactagtattgagatactcattaactttcacaccaccatcagctaaatccaaacaactgtcttcagctaaactaatccgcggcgtaacgcctaacccaacaatgatcgtatcggctgcgatcaccggaccatcctttgtcaatagagtcaagtggtcaccttggcgttgatatgattggacaaactgaccactcatcagtgtgacaccattgcgtttgaacgtggcttcatactcagtccgaatagactcaggaaatttaccctcacccagcgctttttctggaaaaatcatcgtaacttcagtctcattttgggtcagtgacgatgcgagctctgtaccaacatatccaccaccaatgatcacaactcgcttgttcggaccactaaatttacgtaacttgcgataatctgaccactgtctaaagactagcacatgtggatcagaaggtccctggatttgtctaggttctccgccagttgctagcaatagctgttcatacttgatttgctcactatcggccaatgtaatgaccttatcttgccgattaatagccgtaaccgttgtcttgaacttaaaagtcacattgggataattttcagcaccaatctgaatgttctcttcagtaaattcatcatctagccatagttttttactcagtgccggtcgttcatatgggacatccgcctcttgcgaaataattaagatctcaccctctgaatcttcctgtcgaattcccttgatggcatagccagcaaccactccgccaccaacaatgacgtatcgatagctgtttgtctgatccaaatcactcatctaattacctccataactttactttttctaggatcatcgtaacataaaaacgccatgattctaaaaataacgatcaggattgtcaatcgttgcttgcttttatcagaataataattttatttacatactgctacaaagctatcaaatatcactatgatccagatttagaattgcggataacacagcataaaataatattattttaattaaactttgttctttgaaaactggataataagtaatatattagttttaaaagccgagaaaacattgcgttttaaagagttttttaatagaaatatgaattagttcatatcgctaaactcaaataataaccctttaccgtaggtaaagttaggttaagttataaagggcgcacggtggatgccttggcactaggagccgatgaaggacggtactaacaccgatatgcttcggggagctgtaagtaagctttgatccggagatttccgaatgggggaacccaatacctttagtcgggtattatcattaagtgaatacatagcttaatgaaggtagacgcggggaactgaaacatctaagtacctgcaggaagagaaagaaaaatcgattccctaagtagcggcgagcgaacggggaagagcccaaaccaagaagcttgcttcttggggttgtaggacagaacattggagttaccaagttaagttgtaatcgaatcagctgggaagctgagtcaaagagtgtgataaccacgtagattaaacaacttaacctccgttctggatcctgagtacggcggaacacgtgaaattccgtcggaatccgggaggaccatctcccaaggctaaatactccctagtgaccgatagtgaaccagtaccgtgagggaaaggtgaaaagcaccccggaaggggagtgaaatagatcctgaaaccgtgtgcctacaattagtcaaagctcgttaatgagtgatggcgtgccttttgtagaatgaaccggcgagttacgtttatatgcgaggttaaagtgaaaagctggagccgtagcgaaagcgagtctgaaatgggcgagtgagtatatagatgtagacccgaaaccaagtgacctacccatgtccaggttgaaggtgtggtaaaacacactggaggaccgaacccacgtcagttgaaaatggcggggatgaggtgtgggtagcggtgaaattccaatcgaacttggagatagctggttctctccgaaatagctttagggctagcctcggaatattggatcatggaggtagagcactgtttggactaggggcccgtcatgggttactgaattcagataaactccgaataccattgatttagttccgggagtcagactgcgagtgataagatccgtagtcgaaagggaaacagcccagatcaccagttaaggtcccaaaatttatgttaagtggaaaaggatgtggcggtgcacagacaactaggatgttggctcagaagcagccaccatttaaagagtgcgtaatagctcactagtcgagtgccgctgcgccgaaaatgtaccggggctaaacataataccgaaactgtgggtggacacgtaagtgtccgcggtaggagagcgttctaagggcgatgaagctagatcgtaaggactagtggagcgcttagaagtgagaatgccggcatgagtagcgaaagatcagtgagaatctgatccaccgtatgactaaggtttcctggggaaggctcgtcctcccagggttagtcgggacctaaggcgaggccgaaaggcgtagtcgatggccaacaggttgagattcctgtactagtttattttgtttgaacgatggagggacgcaggaagctaaggaatgcacacgactggaaatgtgtgtctaagcaacaagtcttgagttgagtgaaatgcttgattctttaaggacaagttgtgatggggagcgaaattaagtagcgaagttcctgatgttacactgccaagaaaagcttctagtgagaaataaactacccgtaccgtaaaccgacacaggtggtcgaggagaatatcctaaggtgagcgagtgaactctcgttaaggaactcggcaaaatgaccccgtaacttcgggagaaggggtgctgaccgtcaggtcagccgcagtgaataggcccaaacaactgtttatcaaaaacacaggtctctgcaaaatcgaaagatgacgtataggggctgacgcctgcccggtgctggaaggttaagaggatgagttagcgtaagcgaagcccagaattgaagccccagtaaacggcggccgtaactataacggtcctaaggtagcgaaattccttgtcgggtaagttccgacccgcacgaaaggcgtaatgatttgggcactgtctcaacgagagactcggtgaaattataatacccgtgaagatgcgggttacccgcgacaggacggaaagaccccatggagctttactgtagcttgatattgagtgtttgtacagtttgtacaggataggtaggagccgtagaaatcggaacgctagtttcgatggaggcgttggtgggatactaccctaactgtatgaccactctaacccgcgccacttagcgtggcgggagacagtgtcaggtgggcagtttgactggggcggtcgcctcctaaagtgtaacggaggcgctcaaaggttctctcagaatggttggaaatcattcgtagagtgtaaaggtataagagagcttgactgtgagattgacaaatcgagcagggacgaaagtcggacttagtgatccggtggttccgtatggaagggccatcgctcaacggataaaagctaccctggggataacaggcttatctcccccaagagtccacatcgacggggaggtttggcacctcgatgtcggctcatcgcatcctggggctgtagtcggtcccaagggttgggctgttcgcccattaaagcggtacgcgagctgggttcagaacgtcgtgagacagttcggtccctatccgtcgcgggcgcaggaaatttgagaggagctgtccttagtacgagaggaccgggatggacatacctctggtgtaccagttgtgccgccaggcgcatcgctgggtagctatgtatggacgggataaacgctgaaagcatctaagtgtgaagcccccctcgagatgagatttcccattcctttatggaagtaagacccctgaaagatgatcaggtagataggctaggagtggaagtacagcgatgtatggagcggactagtactaatcggtcgaggacttaaccaaaggtgcaatgttaggcttttgaaatgaaatattacttattatgcagttttgagagaacgaagttcttctcagtgcgcaagcacaaaatagtgtggtggcgatagcaagaaggatacacctgttcccatgtcgaacacagaagttaagcttcttagcgccgatagtagttggtgggaaactacctgcgaggataggacgttgccgcgcgaagattctatggagtatctatgtaaaagaaaacactgtaacagcagctcagcttgaaagcgggtatggtgaaactcgattcagatattataagaatcgggcatgcctgcaatttgcagatgcattcatgattgaagacttgcacgagttcaagaaataaaaagtgcggtttttgtgcggattgtctgtggttattagccggatttccgtgataaattagtattatggattattagtaaagcgcgcttaaactgtgaccagtaatcaccggcggaaaacggtggtcgcgctgttgccaaaaatacgatctgttatacccggcaattagcgttaatcaaactttgttaggttaatcgacttcaattctaattgctggaagcgtggggttagcacgttgttgccgtggatgatcgcggacctaaccattattcctagtagcttaagattagagcggcacattaacgtgatgtgaacacgattcgggtttaagtcccgactagggtattatcgcagtggcggaataggtaaagcgtctttacgccttaaaacggcaattgtgtggtgcaaatccacacctgcgatattgccagtaatggcacatacttcacctccaatagccctagcctttatggctggggttttgtattatagatttattggagggtgaaaattatggatagagaaagtttgttagaaatgatcaataatccagaatcaattttaaaggctgataaaaaaacgcttaagcaaagaatagagcaacagaggttaacagctgatgagtatgcagaggctgcaatcgatacaggaaaatctaaaggtcgagaattggttgttgatatattaaatgggtctttagggagtcttatttttgatgtgattgaaactggcgatgaactaggccaaaacatatctgatatgaaaaaatctttggtcgttgcttcttatgtacaaaaatcagacgaccacgataaagcgttacaatgtattgttgacttaattacggatccctatggtctgacattgtattcaaaattaatagaaatacttaatgattcaccggcagatgatgataccttaaatgttttagccaacgttctaaggaatataagtaatgatagtgatttaaaagaacacttttcaaataagagagttgtgttgtctatgattgccaaactatcaccacaggcactcttagtattgcagaaagctaatagatggccgattatgaaagctcccaataaagcaagcatcactgttggaggaataatgaacggtgataacagtgagtatattgcacaaggattattaaaaactgaaatatttaatgacatttcaataacatcattaggactagcaatcaaggagttagaagtaaatggactatgtttcacggcgtctggcacgtttggcggtaaaaatgcagtacaagaaactttaacagattcgggcaaagaggtatataaattaatctattaatattatcaaggcagcctaggctgtcttttttaatcccgaatatttgtagtactgtaagattgagtctacaattaaagtaagaaagaagggatatcatggtagtttatgtatttgggcttcctagtcccaaagatgtttataagcgcgcaaaggataaaattcggaaacagaagaaagataaagagaagaaagcagaagaaggaccagttgcaacaactgcttaaggtaatgaaggatgtcaatacgacgtcctttttagttaggaggatacatggataaatctttttttgaactagtacaaatcatactagactctgattattcgccaactgttaaattagtagaaatacaacgtgtaattgatgtgatgatgcatcacgaaaatcaataaagagatatttgaaaacttttttaataaagtgaaatgcaattacaatcattagggaagtagcgacataaacatgaagttgtggtatattctggttaacggaaggtgatataatgtcaaagactattaatgagcaagttttcgaaataattgatgaaatgtataatgatttggcccacaaagaaattgatcagcatattaaggatattcttttaattgcagcaaaacatttatctacagaagatatgccagctcaagtggtagcagctaaaaccgtaaatggaattacaatttgggccatgaatggtaagaacttattgggtaatgaaaacgctgaacgaatccgaaaattgatgcggattgctcgctccgagggatacaaatggaatgcgactggcttaggttcattaggcgtacaattttaaaagagtttatcttgagacagcttaggctgtctttttttgtacataaaattaaaggagtgataggcattgtgaaactaatacattcaaagtacggctacgaaacacctgaatggacggcagcagatgcccgtttagagaagtggcttaaacagaagaagatagatgagaaacgtcgttcagataatgagcggcgtattttattggagaaaaacaattataagaaggagggcggtgctatgtaatgcatgatgaatcaagaaatgatgcaaaggaagactatttatctgggatgaagtacaaagacatcgctgataaatatgatgtgtcgattaataccgtgaaatcatggaaacagcgtaatggatgggaacgtgggccaaataaaaaagcggtgcaccccaaaagcaaaaagggtgcacacaaagttgaaaaggttgcacccaaaatagtgaaggaattatctgctaatgatgggttaaacgatcaacagaaaatgttctgcttgtactatctgcaacgattcaatgccacatgggcttatatgcaagcttatgacgttgattataagaccgctaatgtaaatggcccaaggttgctagtaaatgctagtgtgcgtgagcaaattgataagctgcgtaacgagattgctaacgacctattcgttacagctgatgatatcgctaaagagtacgctaaacaagcattcgctgatattggcgattacgtagataattaattttttattttcactataaaatgccaaccatctgaccattatcgactattacaatcatcactagcagacatcaaattaatcgtttacaaattaataatataaagtagtatttcacattcttatattttataataaggataagaaattatttttataggaggagtagcatgccatctagacaaccgtcgtattcagccggtaaaattaatgcacgccgtcgtaatccggatttaccaactggcgatgtccaccacgacgccaataactggtttcaaagttcagccgttgaacagcatcccgtcacttttaagaatatctatgaaatgcaagtaactgctaacgtctttcttcccaaagactcgacggaaactgtttttccagcactaatcatcggtgctcccatcggtgccgttaaagaacaggcagctaacctatatgccattaagctcgctgaacaagggtttgtaaccgtttcatttgatcaatctgcttggggcgggagtaacggtgctctgcgcaacgcgattgcccctatcttatatgcggagaatttctcagcagccactgactacctaaccactctagactgtgtcgccaatgaccgtattggcttaatcgcaattggttcggccggtggtttcgcgctcaacgcactcaaaatagacgcacgtattaaagcacttgcaactattaacttaaccgatatgggtgccattgttcgcgaacagcgtgatgcactaggcggcaacgcattaatcgaggaatcctcacgatcccggacattagagattgcaggtcaagcaaccacttacgcccatggagtacctgaagaactggacgaaaactcaactgatatcgaacgtgaattctacgacttttatcgtacccaacgtggcgcagccaactcgacactccatcccactcgtacaacttttactaaactattagatttctatccattgcgcgacctcgaaacgatcacagaacgtgccatgctctttgttgttggtgaagaggcatggtcacgacatttcagtgaagccgcctttgccagtgctaacgaatcaaaacagttattaaccgtaaaagcagctgggcatgtcgatttatatgatcgtatcgcgcttattcctttttcagaattaactcaatttttcaccaaaaatctataacaacgcaaaaaaataccactgacagcgaattgtcagcggtatttttatattatttatcattcaagtaggctttgactacctgataatttttgaagcccccactcaagttatacacggatttaaaaccgaggttcagaagtaaattctgagcagcattagccgtaacccctttattgcaataggtgacagttggaatatccatatctaattccgtgaaccgatcacgaatttcagcaagcggcatgttaatggcatgttcaacatgctcgtccgcatatttttgcttcgaacgtacgtccaaaatctggaagcgttcaccttcagccaagcgttgctccaattcagctggaggcaagagcggccgcccatgcaatgcattatcgagcgccattcccgtatagagcactggatccttagtggttgcatagagtggttgataagctagatcgagatggaataaatcggccaccttcgcacccaatgtgatggcagtcacgaaaacgtcaatccgcttatcaaccccatctttaccaatgatttgtacacctaataattttcccgtttgacggccagcaatggctttaatgacgttttcggttccatttaagtaatctgcatgccctggtttaatgttgtagagtacttccacatcatagtccttagctcgcgcgactgcttcagtaaacccagtctgtgcaatcgttgtatcgaacaaccgaacaatccccgttccaagaatcccgcggtgcgttaagccaccgccagtcaatgaattgccggcaattcgtcccattttattggcagtcgaacccattggtcgatacagtggtgagccatcaattacggagaaactctcaacaacatcgccgaccgcgtaaatattcggtacagtcgtcaacatttgttggtcgaccttcaacgcccctgaaggtcccttagctatcttcatatggtcgaccaactgcgtttgtggttcaacgccaagtgctagtaggaccaaatccgtttgaatggtcgtctgattactcaattctaccgccgataccacaccatcctgcgcagtcacttgttttgcggttacactctttaacacatgcaccccgttagcacgaataacttgttcagcacgataggccatatcaccatcaaaatgggtcataatttgcgcgcttcgttgaactaacgtcacgtccaagccacgtttttgaaattgttccatcatttcaagcccaacataaccggtcccaaaaatcgtcacattttgaactgaatggtgctgtaaatacgcgtcgattgcgcgtgtatctaccatgttatgcatcgtgaagacgttttggtaggcttcatcgaacggtgcaataatgcgtggcgtggcccccgtcgctaaaactaggcggtcataataatcttcaaacaactcgcccgtctcaaagtttttcaagaccagcgcttgttggttttcatcgattgaaatcacttcgatacccgtcataatgtcaacgttgaagcgttttttgaaccacgccgcatcgcgcggaattaacgtctctaggtcttcaacctcaccccctacgtaataaggcatgccacaaaccgaataagagatatcctgacctttttcataaacgacaatctcatcaacttcactatttcgccgcgcctttgctgccacactcgtccccgctgcaacggagccaatcacaacaatcttcatgatcatcaccaatccttattatatttaaagacaatataactcattttaatcttgaatgaaatccatttgttttcgactcccaaattgcaagaacaaattagtgtggatgtattatctaggatattgaaagatatggagcaattatgaaaaagacgcttaacaatataatctacaacggtatttaccagttgttgatactggcattgccaattatcacagtaccgtatgtagcacgtgtcttgggtgcaagagcactagggagttattcattcattacgtctatttccatgtttctgagttttgtgattttgatggggatgaatcaattaggttcaagaattattgcccaatcccacaaagataaaggtgaactaggtagtaactttgtacagttatggaaaatacagtttttagtaggttgtttagtgattctggcgtatacgttctttgcaatgttcagtgaatataaaacatacttgctattgaatattccatatttaattggattcgcaattgacatttcctgggtcttcataggattaggagaagttagaaaagttgttgttcgaaataccttaattaaaatatgttctgttgcaatgatttttatatttgtaaagaaacctagtgatttaggttattacgtattaattaatagtttaagcatcttttttgcaaatattattttctggcttaatttaaaggggatcatcacaaaagtaagttttaaagggttcttttctaagtcaatctttttaaaagaagccatgattttagttatcccacagcttgcagttcaattttataccaattttgatagtacgctagtaggttggattgcagggcctgtccaattaacttattacgatcaatcacaacggattgcgcgaatgttagtaacacttattacttcagttagtaccattttaatgccaagaatggtccaacttcgaatgaatcatgctaataatgaaaaagtggatcagttattaaaaacatcacttgactatacattattagttgcacaactgtttactatgttactaatggtaaatgcatccgaatttgtaccgtggttttatgggaaatcatatacaccaatgacgaataatatgttatgggtcggtttaataatgatttttatttcctatggtgaagtatttggcagtcaattctcattggtcaatggtgattataaacaatatgcaattccggcaattgtgggtgcggtaattagtgttattttaaatgtgatttgtgttaatatctggggagcggatggcggaacggcggttattattttaaccgagtttatcgtatgttctatgagaatttacatggttcgtaaagaagcagatttacggtatctagttcatgaacagcttaggtatgtacttgcttttctaatgaccgttcttgctgtcctgaattttaaaattgtgttacctagtttgttcttaacaatggtagttaattcaattattgtgacaattgtatatgtattgctacttgtattattgagaactagaattaacagagatattgtcagattagtaaagaaagttactcgttaattaatgattgagataataatttagatttaggagaaaataatatgactaattatttagtagtcggttccggactctttggcgcaactttcgcatacgaggcggccaaacgtgggaaccacgttaaagtaattgaaaaacgcgaccacatcgctggtaatatctatacaaaggaaattgatggcattcaagttcaccaatatggggcccacattttccatactagcaacaaagaaatctgggaatacattaatcaatttgcagagtttaaccgttacaccaatagtccagtcgctaactacaaaggtgaaatctacaacttgccatttaacatgaatacgttcaataagttatggggtgtggcaacacctgccgaagcggccgctaaaattgcggaacagcgcaaggtgttgggcgataaagaaccagaaaacttggaagaacaagctatttcattaattgggacggatatttaccaaaaactaatcaaagggtatactgaaaagcaatggggccaaaaggctaccgaattaccatcatttattattcgtcgtttaccagtacggttaacgtatgataataattatttcaacgatacataccaagggattccaattggtgggtatacacaaatcattgaaaaaatgttggctagtgatttaatcgatgttgaaacgggtgttgatttcttcgataagaaacaagactacatcgatcaatacgataaagtcatctttaccggtatgattgatcaattctttgattatcaattaggggaactcgaatatcggagtttacgctttgaaaccgaagaaatggacgttgataactaccaaggaaacgcggtcgttaactatacagatgccgaaacgccttatacacgggtgatcgaacataaacactttgaatttggtaaaggcgataagaataaaacaatcgtgacgaaggaatatcctgcgaactggtcacgtggtgacgaaccttattacccaatcaataacgacaaaaataaccgcttatacaaagcataccgcgatttatcggtgacagaacccaaagtggtcttcggtggccgtctagggcaatatcgttactacgatatgcatcaagtgattcatgcggcattacaagttgttaaggatgaattaaaatagaggagatttattctatgaaaattttaatcactggtgcaaatggtcaattagggaccgaattacggcacttattagatgaaaatcaaattgaatacgtggggacagatgctactgagttagatattactgattcagcggcagtcacaacttacttcgaaaagaataagccggaattggtttatcactgtgctttaaagggactcgttttgagcacattagtgctcaagatttaacgacgacgttactccaaattaaccagccaccgcttaaaatactcgactggcaaacaccgtatcaggttatgctgacaaatttgtccaaaaattcggattaaatttgcaatctaccattaatggttgcgaaccagtaattcagtcactagccggcgtaaagtttgttgtgtttcaccagttggtagctgatcgattaggttcagtgcggttttggtatagtgagtggccaattgttgtgcctgggtaacgccccccaaagcaatgacctgatcgcgaattgtcagtagctgttcattactgatgtggtcgccgggttggggtaattgttcggccaattgtggttcagcggtcagggcgtagataagtggcagtgaataaacgccgtcccgtaagtcattaagcaccggcttttgagttaaggcctcatcaccggcgtagtcaaggacgtcatctaacatctggtaggctaaccccatcctttcaccaatctgttgcgctagtttaacgacgcttgcgtcggcacccgcgaagtgggcaccttgttcacaactgaggctgaacagacgggccgttttgccacgagcaattgctaagtagtcatcgaccgtggtcgtcggatcgaagttatgtgccatttgatccagttcgccttggaggatggctcgcatcgccgcagtattgattttaacgtcgtcagttgtcttggcagcaatcaggacttgatcgaaatagcaggtaaacagcagatcaccggcgtaaatagcattacgttgaccgtagtcttggtggatcgttgtcacatggcggcgttctggcgattcatcaattacatcatcgtgaatcagtgttgccacgtgtagtagttccatagccgctgcgccagcacgtaaccgggccgtgttatgatccggtccaaattgactaaacaagtaaaagaagcccgggcgtaaaaacttaccacccgcagcgagtaagtcgtgtacgcggtcattaatggcggcgttatcaatttttacgttagtagctagatacggcttcagcgctgctagctcctttgcgacaagactttccggttgccaaatggtttgcatcataatcaaaataccccgctttatttgagagatggctccgggacgttttgacgccaacacttgcagccagtcacattctaaaatacaatctatattaaaggtacaaataacttgtttcgttatcaaacaaaaggatggtgtaaatcattgaaaccaaaagtgtttcttgaatttgttgaaattaaatcattaattgcgagcgtgttaccgttcgttttggggagtatgtacgcctattataattatcatcagttacatcttggttatttattgctatttttcattgcatcttcactttttcatatggcgactaatgcgaatgataattaccaagacttcctacacgcgccacgtaatgacgacaatcaagaatttttgcaagagactaatgtggtcggtgttaaccagatttccattggtcaggcccggacgattacgtttggtttagccggaatctcattgattatcggactatggttagtaacacaaacggggttgccgttgttgtggatggggctatattcatatgcggtcggttacttttacgctggcggaccgaagccaatttcacaaggcccgtttggcgaatttttctcgggctttacgatgggctttatgatcttctggattgccgtctttattaatacgtatgacacggcagccattacttggcagtcaacgctggctgttttaattgcgtcaggtctggccatttttgcaatttctaacattatgttagctaataacatttgtgatatggacgaagacattgcgttaggccgacacacgattttgtattatcttggcaaaccggtgatgcttcaggtatttgcatggagttacgttgctggctatgcttgtctggtgatcgcggtcttgatgggtgtgctgccaaagtttagtttactaacgttgctcagtattattccagtttggaaaaatacgcgggtcttcttgcacaaacaggtcaaacgagaaactttcacgatttcaattaaaaacgcaacgttgatttgtctttcatttatcgttttcatgggcttaggactgatttttaactagtccttcaataaacgagtatggctttgagaaagcgccaactaaccaagttgatactaagcagtatttttcccagcgagtccaagctggctttctgattttatggcttagggtttttcaatggtatttcacgggggtaaaaaaagcttagatatcgtgtgaaaaaaagggcctagtacttttggatgtaagctgattcctgagacaacttttaagagagcgtataatgaataaatcgcttcagcagcgtaagttggagcttcttaagaaaatgaaacggggacatttacaacaaatgtttccttctacaggtcagcctactcctcaattaagattcagcaaatttaaaggtgattggaaacaaaataagttaagtggcattgcaaaaattacaatggggcagtcacccaaatcggaaaattacactgacaatcctaatgactggattttagtacaaggtaatgcggatataaaaaatggtgaagtctatcccagagtttggacaacacaagtaactaaaattgcacaaaaaggagatttattattaagtgtacgtgcacctgttggagatgtggctaaaacaaaatataccgtagttataggacgaggggttgctagcgttaaaggaacagacttcatttattatttattggagaaaataaaatactcaggatactgggagagaatcagttcagggtcaacatttgaatcaattaactctaatgatgttaaagaagcaaaattttacgtcccaaaagaaataactgaacaaaagaaaattggaaatttttttcaaaaactcgatcaaactataacactccagcagtctaaagtggaaaaactaaaaattttaaaacaatcttatctccaaaaactcttcccttaaacaaaattcgttaattaacgaccatttattatttatactttgatagtgaccaaaattggtcactattttttatatgggagtggttagttatgcggagaaaatatctttttcacgaatactttgaagaatggatggtgttatataagcgcggtgcgattaagcaggtcacttatgataaatatgaattaacgcaacgtcagattaaaacacttgcgccaacgctgctattgtcggagttagaccgtcgagcctatcagcaattattaaacgattatgctgcgacgcacgaacatcaaacgacaatggatttccaccatcagttgaaatcggcaatctatgatgcacttgacgaaggttatttaaagaaagatccgacgcgtaaagcaattatcaaaggtgttgttcagagacgccataaaatgaaatatcttaatcagggtgagttacgccgactttttggtgtcttaaatctagaagacgaagttaactgggattactttattttattactagctaaaactggcttgcgctttggtgaggcattagggttaacgccatctgactttgattttagaacacaacaattaacaatcgataaaacatggaattataaacattaccgcggtggttttcaatcaactaagaatcagtcgtcagttcgaaaaatttcattagactggcaaatcgcaactcaattcgcacatttaattaaagatttacccgaaaaggaaccaattttcatcgacagaacgcgccgaacacataatgatacagcgaatcattatctagaacgtaaatgtaaacaagcacagattcctgtcattagtgtgcatggtctcagacatacacacgcttcaattttgctatatgcgggtgtttcactagcatcagtggctaaaagacttggccatgccaatatgacaaccacgcaaaaaacatatctgcatattatcaaagagcttgatagtaaagataacgacaaaataatgcagtgcttgatgacactgaactaagcaaaaaaggccgcgatttttcgcgacctttttacatacgtttgttttatggaaagagtttttgaagataagcttgttttaatttatttaactgatctatttttgtttgttgaagaagtaacatgttgtcaacttgattgaaagtattagaaattcttctttgctcatcaaaatgtggaacattgatcttaattgatttgagtgtagggaactttaaattccaagtatcagatgttagaccttgggagtttcttttaaaggcttgtatcatattaaaacgtttaaaatcataagcaaaaaactccgaatcaatttcatttttaggagtaatcacagtatacgccggactaagaatacctttgtatggagaatatccactcgcaccttgccacattctcattgaattgtatgcaatgtctccaatctcaacttttttataatttgatttgttcttactcgagttatcttttctgtctagctcactggccttaacaacacctgaatttatagtaacagaaatcagttcaccttctccacttctctctgttcgctctgtaaaaatttctcccatcgtacattgtttccaatcaccattaaattctttaaatcttaatctaggaagatacttatctttagaaggaaacaattgttgcaaatatccctgttttaactttgtaagaagatctaacttacgttgctgaaggctcaaaaagaatcaggcgcaaccgtttttggttatcatgtgaatgatccagaacgctttggcgttgttgattttgatgaaaatatgcatgctaaatcaatcgttgaaaagccagaacatccggcaagtaactatgcggtgactgggttatacttctacgacaaccaagttgtcgacattgcgaagaatattaaaccttcaccacgtggcgaactagaaattacagacatcaacaaagcgtatcttgaaaaaggccagctagatgttgaattaatgggccgtgggtttgcttggttagatactggaacccatgattcattacaagaagccagcagttttattgcgaccgttcaaaaacggcaaaacttgaaagtggcgtgtctagaagaaattgcttaccgcatgcactatatcgataaagcaaaagtgattgaattggcacaaccactcaagaaaaacgactacggtcaatatttattgcgattagtaaaagaagattaggggtaagtaatcatgggtaagttaaaagtcacaacaactaaattacaagacgttaaaattattgaaccagccgtctttggtgatcatcgtggattctttacagaatcttattcagatcgcgatttcaaagaagcgggcattgatattgatttcattcaagataatcactcactttcaacgcaagcaggcgttttacgaggcttacatttccaacgcggtaaagctgcgcaaacgaaattaattcgcgtggtgactggggctgtcttagatgtcatcgttgacgttcgtgcaggttcaccaacttacaaacaatgggaagggtacatcctttctgccagcaatcaccgtcaattacttgttccaaagggcttcgcccatggctttgtcactttgacggataacgttaacttcttgtataaatgtgatggctactatgatgcagaagctgacggcggtatttcattcaagacaccagaattaaacatcgattggccaattgattttgaccaagcaattacgtctaaaaaagatgctaaccaaccaacctttactgaatttgaaaaagataatccgtttgtttacggtgaaatttaaggagatcgacacactatgaaaaatattattgttaccggtggggccggctttatcggttctaacttcgtgcattatgtggtgaataaccacccagaagttcacgtgacggttttagataaattaacttacgctgggaaccgtgcgaacttggccggtttaccagcagaccgtgtggaattagttgttggcgatatctgtgacgctgaattagtggatcgcttagtccaaaagacagacgcagtggtacactatgctgccgaaagtcacaacgataattctttgaaagatccttcaccctttattcaaacgaacatcatcggttcatatacgttgatcgaagcttgtcgcaagtataatgtgcgttatcaccacgtttcaaccgatgaagtatacggtgatttaccattgcgtgaagacttaccagggcacggcgaaggcgttggtgaaaaattcactcctgaaacgcgttataacccaagtagtccttattcatcatcaaaggcgagctcagacttgttagtccgggcatgggtgcgttcattcggcctacaagcaaccatttcaaactgttcaaataactacggtccttatcaacacattgaaaaattcattccccgtcaaattaccaatattttaagtgggattcgaccaaaactttacggttcaggtcaaaatgtgcgtgattggattcatacgaatgatcactcaagcgccgtatgggcaatcctaaccaaaggcaaaatcggtgaaacttatttaatcggtgccgacggcgaacaaaacaataaagatgttttggaattaatcttagaattaatggggcaacccaaagatgcttatgatcaagttaaagaccgtccgggtcatgacttacgctatgccatcgattcaacgaagttacgggaagaattaggctggcaaccagaattcactgattttaaatcaggcttacaacataccatcgactggtatcgtgacaatgaagactggtggcaagcagaaaaagcagccgtggaagccaactacgctaaaaacggtcaataactttgaaaactgaacaaagtttcgacaaaccaaatgtgtagggtcgcccttcggggcacaaaacatatttgcaaagtcaatttcgctagcaaataaattaagtaacaaaacaagagctacaaacttttaatcgagagtttgatcctggctcaggacgaacgctggcggcgtgcctaatacatgcaagtcgaacgcactctcgttagattgaagaagcttgcttctgattgataacatttgagtgagtggcggacgggtgagtaacacgtgggtaacctgccctaaagtgggggataacatttggaaacagatgctaataccgcataaaacctagcaccgcatggtgcaaggttgaaagatggtttcggctatcactttaggatggacccgcggtgcattagttagttggtgaggtaaaggctcaccaagaccgtgatgcatagccgacctgagagggtaatcggccacactgggactgagacacggcccagactcctacgggaggcagcagtagggaatcttccacaatggacgaaagtctgatggagcaacgccgcgtgagtgaagaaggttttcggatcgtaaaactctgttgttggagaagaacgtatttgatagtaactgatcaggtagtgacggtatccaaccagaaagccacggctaactacgtgccagcagccgcggtaatacgtaggtggcaagcgttgtccggatttattgggcgtaaagcgagcgcaggcggtttcttaagtctgatgtgaaagccttcggctcaaccgaagaagtgcatcggaaactgggaaacttgagtgcagaagaggacagtggaactccatgtgtagcggtgaaatgcgtagatatatggaagaacaccagtggcgaaggcggctgtctggtctgtaactgacgctgaggctcgaaagcatgggtagcaaacaggattagataccctggtagtccatgccgtaaacgatgagtgctaggtgttggagggtttccgcccttcagtgccgcagctaacgcattaagcactccgcctggggagtacgaccgcaaggttgaaactcaaaggaattgacgggggcccgcacaagcggtggagcatgtggtttaattcgaagcaacgcgaagaaccttaccaggtcttgacatcctttgaccactctagagatagagctttcccttcggggacaaagtgacaggtggtgcatggttgtcgtcagctcgtgtcgtgagatgttgggttaagtcccgcaacgagcgcaacccttattactagttgccagcatttagttgggcactctagtgagactgccggtgacaaaccggaggaaggtggggacgacgtcaaatcatcatgccccttatgacctgggctacacacgtgctacaatggatggtacaacgagtcgcgagaccgcgaggtttagctaatctcttaaaaccattctcagttcggattgtaggctgcaactcgcctacatgaagccggaatcgctagtaatcgcggatcagcatgccgcggtgaatacgttcccgggccttgtacacaccgcccgtcacaccatgagagtttgtaacacccaaagccggtgaggtaaccttcgggagccagccgtctaaggtgggacagatgattagggtgaagtcgtaacaaggtagccgtaggagaacctgcggctggatcacctcctttctaaggaataatacggaaaaccttgtacatttgcgaagtcgaaactttgtttagttttgagaggtctactctctgcgataatccctttatggttgtcagatgaaatacaataattcatctgacgactatggagggatttttgtatgcccagatctaaacatacggtactcgagaaattaacaatcttagatgaactgacccaatcaaaaattggactgggtccggtggccaatcgccatggcattaatcataagacgctagagcgttggcgagatcgatactcccgtgatggaattaatggtctaaaggaggctaagaaaaacaaacactattcgaaggaactcaagctcaaagtagtccacgcatatcttataggcgaaggcacctttgatgaacttgcaaataagtttggacttcgtggatcgcagcaagtcgtagactgggtaaacaagtataatgggaataaacctttgacggcgtcgccgtccagaaagcaggttcccactatgagccgtaaaacaaccttggaagaacgcattgaaattgtcgagtatgtcaccaagctgaatcattcatacacagaggccgctgaacgcttccaagtctcttatcaacaagcacgttcatgggtaatcaaggccaatcacggcggctatgaggcgctcgtggacaaccgtggccatcacaaagaacaagctgagctgactgaactcgataaagccaatcttgaaatcaggcagctcaaagcacagctcgcagacaaagagcttgtggaggcattcgcaaaaaaattgctggaaatccagcgcagggggtgagtaaacaacatcgactgtcttacttcgcaattaatgaggtcagtcaaggcaagcgtggtgcaatatctacgctgttggccgttgtcggtgtaagccggcaggcttactacaaagggttaaatcgagaagaaacagcttgggaagcccgtaatcgtcagctcaaggaacggacacaatactggtttgattttcatcatcaaggtatcggtgctgggaaccttttattgaatcttcaacatgatgacctaattgacttccccgttactttcaggatggtacgtcgtgtgatgcgggagctcagcttgacatgtcaaattcgggtcaagaagcacagtcgacataaggagaacgaacagcacattcaagacaatgtgctcaatcagaacttcgacgtcgacagtcctaatcaggtctggttgtccgattcaacggaactgacttacggcgtaaataataagtataaggtgcgcttgagtggcgtccttgatctctacggccgacgtttgttgtcctacaatttgagcactactgaaacgtcagcagcagaaatcgaggttttccaacgagcctttgaggcttctggcgacgtccacccattggttcacactgatcgaggatcagcctacacctctggtgccttcaacaactttcttggtcgttacaacgtcacacgtagcatgtctcgaccaggaacaccatacgacaacgcaccgatggagcgctggtggaacgaattcaagttacggtggatggctcgccatccactagcaaagacttgcgaagagcttgtaagactggttgaggaaggaatcgaatatttcaatcaccacaaccgctcagcacaaagaaacggcctcaccccagatgaatactggagtgaagccgcatagagacagattcaactttatattatttcatttgtcaacttgacagggcctagtgcatcctgaataattcatactttgttgcgtaaaggtaatttgccccttttaacgtttaatttagctcaaatttaatccgcaactatttttgagtgtatttgagctatttttaagacaattttatttttgattggtgtcaaaagagtaaactactcccttgatcgtacttaaattttttaaattgtcttttttaattactagtgagctgaaattcttgaatcctaaacaatgtttgccagtataaatcatcaaaaacattggtactagaaagatgcagccataatttacgtgcatgttgggtgactctgccggccaaatgaaagagcttgaaacgtaaagtggcgctcgttgcgttccctaattcagctgggaaaaccagttttttcatggcttgaactaagttataagccacaccggcgagtaacattctaaactggttagccgtaaaactggaactatccgttttatcaaaggcaaagccacttttaacttctttgatcagatcctccatggctccacgttggtgatagagttcaaagacgtcactggcaaaagccagctccaagttagtcacgataaattcgtgtttaaagagtagctcgccagcagggcgagttgatttaatgatcacggggtaagcgcgaccccaagtgtccggttggtaatctgtcaaacggtgccactggacatctttttcggcgaagtcttccccaggttgccccacatggatcaagtgctcggcgatccgttgtagttttggattagccttgagacggatcgtaaactttgccccagcttcttcacaggcggcataaatttctggcttggcaaaacccgagtcagcccggactagtacatctaaagcagcgtattgtttcagtagcggtttcaaaaaagcttccgcatttttggaagtgtattcgttacctggccgtaatttagctcctaagagacaacccgaaaaaccatcaaaagccaacaggggatgataaccgttcgtttgataatgggtgttaaaagcactgcctttctggtaaccaaatgtatcggaatgagtcgaatcaagatcaatgatcagttgacgttgcttcttttgtgtgatcactaactgcgctaacttggcgactaattttgtgatcccggccaagtcgtctgcggaaatttggttgatatagcgtgaaagagttggttgcgaagcaactaaattatctaaaacaagctcaaagctcatgtctgcggtcagtttattagcggcagtatcgtcgaaataacccgcaatcagctgaatcaacagttgtttaaacagctggttcttatggtacctatagaacttgcggttttccttaaaatggagagtttctttcaaaaggcgcttaaagtggatctgatgcataaattcagccactaaaattagacccgcatcgttagataaatgaccaccattattagaaagaaccagatttttgttgaagttaacggtttgttgttgtaaagtcgacatatggagcactcctgttctgtgttggttttggtcgacttaacaatagcacaggctgtgctctttttgtatacgcaattaaacacctaaaaggtgttggtttggatcacggacaaacaagatgataacaggcaaagaaagaaaaactgttaaagatatgaattattcaggtattaccaagtccagttgctgcgcgtgctggcggatcttcgggtggctctggtggttcgggtggtagcggtggtgggtcttcaccgacatccagttatgttggcggccgtagtcgtgattattattacgatgatgcgggatgtcggcattactacaagtccccaatgcgtcgtttattcgatagtatagtcaccctgcctttcgtattcgtctcccttgggatcatgatttggcgtaaagtgcgtgactggttaaccggacgtagaaaacgggcactggctgataccatgccgttagatgctgaaaccgcggcgcgctttgaaaatgcattctatcaaattgaaacagcttggccctcaaatgacttaagcaacgtggcggacttaatgacgccccattttcagcaccaacaacaacgcatcttaaaccgttatcaacggcaccataaacataaccaacttgagagtatcgccattgtttcaactgagttattattacctgaaaaaccgaaccgccaagatattctagtgacagcgcaaatgcgcgattacttcactgatgagcggcagacagccacggttaatgaccaacgtcgtgaagcggcttatattgaacgtttcagcgaaatttgaacgtttaaattaattgatggtcaatatcgtgtcgctcatattaatcaatccctataaaagagctaccagttggtggttcttttttgttatttaattggttaagtttattgcgttaaacaactttttctcttaaaatagaccttatcgatttaaaaattgtttatccattttgattagaaagtgaggtcatttgatgaccctccatgttggcactggccagacacaaacggccgtttccttaatgccgcgtaacctagacgattgtgtgcgtgaaatggcactcgttgagcaaaagcaagctgcgattgatattctagaatggcgcttagactattggcaaacaccagcgaccttattaacggctggtcaccaaattgccgcctgcaagcaccccgttattttaacgctcagaacaacccatgatggcggcctgtctgatccaaccgactatttagaccgctatacagctctattatcggctcaaatcggcgatgtggttgatattgagtggtctttacctgaggcagttagaaaagccgtcagcacgcttgcacgtgcgaatggctatcaagtgttactaagccatcatgatttaaagacaacccctgataatctaacacttcaaaaacaactcgcagcaatgcatgcgacgcacccagatatgttaaaactagcaactaccgctcaaagtaatgaggatactactcggttaatggcgattacccagtcttttacacatgatcacacaaccccactgatcacgatggcgatgtctgaatttggcttagcctctcgcatttttggtggtcaattcggttcagctgtgagtttcggttaccttgaacaccccagtgcaccaggccaattacccattgaacaactcaaaggcttgttgacaatgcatcaaaattaaccgcacaaaaaaagccccgcactagttagaagcaagatgaatcaccacacgacgggcgtgccaagtaatcctaccggcgatgtgaaagagactgaaccgtagcgaggagatggttgaacgacggtcttccgagacaaagagctgtttaaagagctgaaccaggttataggcaataccggtgatcaaggctcgtgcagtgttccgtgcaaaagttgagctgtctgttttgtcaaagccaaacccgcatttcagctccttaatttggttctcagcattgccccgctgtctataggtcttgaacaaagtctctggagcctcggaggccaggctggtcactacgaatgcgtggttccagggaactagctcatctgccgtatgagtagaacatacgataacacggcgagctttaccccatgacgcggcctgatacttgaattcgtggtagacgcatttgctctcttcatattttggagggcaatccactaaggccgtttctgccagcttcccaagctttgaatttgccttgagtcgaaccaaaaagtcgacgccatgtgtgtcgcacatctcgtaaaattttggcgcagcaaaccccgaatcgcctcgaatgatgacgctggtgctttgagggagcgccgataggcgcgaaaaagttgtctcgacgaacttatcggcttccttgccggtgtactcattgccagggcgcatcaaggcgtctaagagcaacccggactcttgatcaaatacaacctgagggtgatatccataggccatatagtgagcgttgaaggcggaccgttcttgattaccgaaagtatcacaatgcgttgagtctatatccagcacgaagcgggattgaccactaagacggaaagccaaggcggctacttgccagataagcttccgaaagtcatctaggtcggcgtcttcaaggcgcttgaaaaaccgtgaaagtgagggctgtgagactagccgagagctacccaaggtggccgccagtacgggatcacgttgccagtcattggcactactgtcatgtaaatacccggcaacgtcgagcaacaatttttccaagaagatgtcgatcatcgaggccttccagaatcgtcgttggtctggtaacttgaggcactgattggcaagttgcctaaagttgatacgatgaagaaactcttggaacaaaacgagcccggcgtcatttgaaagttgaccgccgtcggcggtcagagtcacattggtattgcattgcagggataagctggttaaagttgagatggtgtgaagcctcgctttcgtgatggttttcgttgactcaaccttagcatataggcgcacccaatgggtgaaacaccaaagcagcgcagtcccgtgtgaatcgtgggattgcgctgcttttttgaaattctatgaataatccaggcccgttcagattttaaaaacgctttagagtatattaaataagccccaacattattgaatttaatagcctgtagctacgctacaagtgaaatacgatcactgttataccaacgaatatagttatcaattccggcgattgcttcatgaattgtcttaaaatcttggaaattaacgtattcacgtttcaaaattgaatgaaaactttcaattcgcgcgttatcgccgggctgaccctttcgggagtaagaatgcttgataccatacttcgataaagtgttttcaaataagtcacttgtgtattggcttcccatatcactatgaataatttgtggtttaactgcttgcgccatgacttgggtaataacgttagtcgctagttctttagtcatctgcgtattaagttggtaagcaataacccgtcgggttactggattatagacactagctaggtaacaccaagtatggttaaggggaatgtacgtaatatcagtcaataaaataccagattgatcagttaactgcttaatcaagtttggtcgctgatcataatcagtctgagtggttggcttattgattcgtttaaccattctagatctaatccctaattcacacatttgttgatagaccagacgctgactaacgtgaatatcagactgttgatttagtaagatcgttaatcgtgggtagccatacattggatatcttaaccaagccgttaacacttcttgtttaattaaatgccggcggcgttcagttctacttggctgccaatgtagataatcatagtaggttgagcgcggaattttgagtactgataagatacgcgtaatgcggtgcccagcaagtaaattagcgttgacgacttctaacacgagggcacgccctttaataattagctttttgccatgagcaccgccgctcgttttaaaatatcaagttcttcttttaaccgtttattttctttaatcagagcacgttcatttgatgatagcactttagtgttgttaggatcagcttgtttaatccacttagtgaccgttgaaacactgacgttgtattctttagccagtgagttggccgaacggccagtctgacttaagctaacaatcgattctttaaattcatttgaatatttaattgccataataaaaagctcctttatgatgtattatatcgaacagtttgtccgtaattccatcataggagccgccgagcttcggcctcaaagttttgctggggtgtgcagtagccctgttgtttgcgaggcaactgattcaagcggtcttgcgtggcctgcacttgactagggctaatgtcatctagggacatgcccttagggaagtcctggcggatcatccggttatgtgcctcgttggtgccacggtcgcaggacgtgtaaggatgggcgtagaagatctcagtttccgtcccagcaaaagcagtatttaaggcggtgaactcgggtccgttgtcggctgtgatggtcttgatgcaagctccccattcgcgcttgattccacgcaatgcatagctcacagagtctgcatctcgtccttcgatcaagcggagaagttggcaacgggtcttgcgctcaatcagagtcaagatgacgctctccttgccattgcgtttaccgacaatggtatccatctcccagtgaccgaactgcctgcgtcgttcaacgaccttaggccgttcctcgatactgcggccagccaggtgcttagccttggtgtggtgctggtgagaggtcttccgcttagtcttctccaacaggtcgatatttcgaatctctaggcgttggtcgtcaatgtactggtacaaagtcgaggcacaaacaagctcttcaggagtaaacagcttgtgtcgcttggcatagccgattgaagcatccggcgaccatttgtcctgcttagctcgctgtacgtaccaggctaagaagacctgtacgctggcgaacttgtcaggacgatggcagctcaagcgtgcagtctcgtaacgtgcctgagcagcctctggcaggtattgtcgatggtagacgcgcttgccattactcttcttgacctgatctactgtacctcgcttgatttcattattaatggtctgcgggcagacgccaatttcagcagcaatccaacgattggacttcccagcttggcggaatccggccacttttccgcgctcgagtgatgttaagtgctgacctttttggcggtgtgtgctatcctgtttctgcatcaagacaatatcctcttccattgtttgtgtaggaacttcaatgatacaggatatctgttcttgatgttttttattgtccaaaaaattttgagacagtggctaacttgattctaaaatgcgcgctatgaaaaaggcattaccactagagaaattgccgatttaattgaaaagatgtatggttcacactatagtcctacgaccatttctaacattacaaaaatggttgatgaacaagtgactgcttttcattcccgtcctatttttcattcacaatatgtttgtctttttctagatgctacatatattcccttaagacgtgacgctgtccagaaagaagcggtacatattgctttagggattacttcttctggagaaaaagaaattttagattatcttattgccccacaagaatcagatgctgcttggtccgatttattaggcagtcttgtttctagaggactaactgatgtgcaacttatcgttgccgatggcatgaccgctattcaaaatgcttgcgaaagaaattatccccaagctaaatttcaacgatgtcttgtgcacattaaccgaaacattatgggaaaggttcgcgtttctgatcgtaaagaagtagccagtgatttcaaaggaattcatcatgcgatcaattttaaagagggtgaagaaaaaatccaaacctttatagaaaaatgggagaaacgttatccaagaatgacgcactctcttcaaaacacagaaaatctcctgatcttcacgcaatttcccaaagctattcgaggtactatttattccaccaacattattgaatctttcaataaacagttgaaaagaaaaacaaaaatcaaagaacaatttcctaatgaagaagctcttgatcgttttttagtcacccaaatggttgattataataataaaaaaactggtagagcccataaaggttttaaacaatgccaggacacattggattcaatgttttaaaaatataaatcaaactgaataaggtttaaatgaatttacacaaacttcttgacacaccctagataacataataagcggagaagaatcaactcatgaacaataacaaacaaagtagcttttttgatggtattggtttaggcattaatttaataatagcaggaatatttcttccgctactatttcataattaaactaaaaaacactatccgattggatagtgtttttttaactaattgattgaacgcgactggcaatcatcaccactaaacaactcttgatcatttcaatcggaaaatacggcacaaaaccggtcattaagccggtcactacggataattttaatgaccagattagccagagtgtgccaaatccgagttgaataatgcttgctagcacattgccgccgagaagtacgcggttcgattgtccaaatagttgctgactatagtgaacaattgccacataagcgataaaaccaatcagatagccgcctgttggtccgaccagcactgcagccccactggcataatttgcaaagaccggtaagccaagcatgcctagcatgagatagctcccgatgaccagtcgacttaagcgccatggtaacgtggtgccaattacaccaactgcgagcgtttggagtgttactggaaccagcgaaatcggtagactgacttgagcgctaaccattaataacgccaagcacatcccgactaagctaacttttctggcaaccgatagtgtcatttaaatcagctcctccttaaaatcaatcttttggccgactgccacttgcgagccattgctcagaattaacgtgccatccgctaaaagctgtgtaatgacaagcccattttgcaaacgtcggccaataatcgccgaccagttgcaataatgagcaccaatcgcctcgtccgcttgggccaatccggccgctagtcgattaagatacgtggcacaaaattgattgatgttcacttggtgggcgtttacggcttggcttacatccattatgaaactgccgctgccgtcctttttgaatatgtgcatgctttctacaacatgctttctacaataggaagagaattcatagttcactgggctaccagacccccttacaagttggctcccatggtgaatatggatggcaaaaataaactttgatctgataatcctgttctaaggcctgataattggcaaactctttaccatgatcaacagtaatggattttacttggggaccgaaggcccccataaacttaccaaaggcggtgtttagagccttagccgttctattaggggctttgatggcccatagaagtcgggtcttacgttctacgaatgtaaccagacatgatcgtgactcacttcgactagaaagcaccgtatctacttcccaatgaccaaaagctaaccgttgattaacagttgttggccgttgttcgatggaagtcccacttgtaaatttcccacgattttcgctcactcggtgctggcggacattccgattgggtagatcagtcaatttgaaggggagccagccacgattaagccaattataaattgacgcagtgctcaagttataagcggccgcaatggtttctggtgaccaggttaatcgtaagtgattggtaattaaagtcgctaatgctgccgtcagcatcgaacgacgaccgcaattccgccttttgcgatctgcatcttgctgagctaattctggatcataaggtttaactcggtccaactcatagctaatcgtagctttggcgacgcctaaggcgtcagccattacttggtaagatttattcccctcattgaccagttgtgctagtgcgccacgttgaaaacgtgataaagtagatgtacccaaagtaatcactccctatattggttggaattagtgttctttgaagcatttctgacaaattatcaccataatagatgttgtcgcccaagattaagcatactgaatcatcgccgatgaaatccgccccaatcacgaaagcttctgccaaaccattgggttgttcttgaacggcgtattcgatgtttaaccccaaatcattgccgttgccaaataactctttaaaccgtggtgtgtcagttggggttgagataaccataatatcttgaatcccggccaacatgagcactgacattggatagtaaatcattggtttgtcatagattggaatcaattgttttgataaagcgcgtgtgatgggatacaaacgtgtcccggaaccgcctgctagaataatacctttcataaaaaactcccccttaagtttgaactaattaatttagaaatattatgtccatttacttcttaacagattttaaaattctatatattaaatacattagataattaaattcttcatttctccaaaacaaacctgtaaacagaatacataatattaaaatcgcaattatggagcgtacaattattcctgttagctcaccaatcagtacaaatgaagtgattgtgtaaaccatccctataattaaaactcctaaaattataaataaatattgcttgattaaaaatgattttacactctttttaaatccgtaatggaatatttgcctattttcccaccaactacttattaaaatagtcgttaatagagtacctgttaggacaccatttattccccaacccaaggcgatattcgcgacaaagatttcatgcgcagcgtcttccaacaagaaaaagtcagcggtgtgattcatttcgccgctttctcaatcgtgcccgaatcgatgcaagcaccacttaaatatttcgacaataacacatacggcatgactgccttactcgaagtgatgaatgaattcgacgtcaaacacatcgtcttttcatcaacagcggccacttatggggaaccgaaatcaattccaattaaggaatccgacccacaagtcccaactaacccgtatggtgaaagtaaattaatgatggaaacgatgatgaaatgggctgacagagcttacggtattaaattcgttgcattacggtacttcaatgtcgctggtgccaaaccagatggttcaatcggtgaagatcatcacccagaaacccacttgttaccaatcgtgttacaagtggctgctggcaaacgtgaacaactctccatctttggtgatgattatgatacaccagatggcactaacgtccgcgactatgtccacgtgttagacttagccgacgcccatattttggccctcggttacctcgaagaaggccatgatagtaacgcctttaacttaggctcatcaactggtttttcaaatatggaaattgtcgaagccgctcgcaaagtgactggcaaggcaattcctgtgacaatggcaccgcgtcgtgctggtgatccaagtacttttcgggaaaacaggattcgaacctgcgaccccctggtcccaaaccaggtgctctaccaagctgagctatttcccgttatatgcacccagtaggagtcgaacctacaaccttctgattcgtagtcagacactctatccagttgcgctatgggtgcatttttcattatgatgccgaggaccggaatcgaaccggtacggtagtcacctaccgcgggattttaagtcccgtgcgtctgccagttccgccaccccggcttaatcataatgaaagcggaagacgggattcgaacccgcgacccccaccatggcaaggtgatgttctaccactgaactacttccgcatcttaatgccgactagacgattcgaacgcccgaccctctgattacaaatcagatgctctaccaactgagctaagtcggcataataagataactttcattgaatattcaattgaatgcgggtgaagggacttgaacccccacgtctatatagacactagaacctaaatctagcgcgtctgccaattccgccacacccgcattttggcgtgtaacttggccgatgagtcgtgacaggctcgaactgtcgaccctctgattaaaagtcagatgctctaccaactgagctaacgactcaatggaggttacagggctcgaacctgtgaccctctgcttgtaaggcagacgctctcccaactgagctaaacctccatcaataaaaaaattaactattagtattcaaaagaaccatggtattaacgcaacaaaaaaagccctatctctaaggctttttaaaactgtataatgttcaattataccggtgatcggggtcgaaccgatacttccgtgaggaaacgggattttgaatcccgcgcgtctgccaattccgccacaccggcattttgaccaattaaggttagcgcctaaacgcaaaggcggtaaccggatttgaaccggtgataaaggttttgcagacctctgccttaccacttggctataccgccataaaagaacaaatcctgtcccttaaaaagtaaattgggctagctggattcgaaccagcgcatgacaggatcaaaacctgttgccttaccgcttggccatagcccaagaataaaggcggtatgtgggaatcgaacccacgtatgtcggatccacaaaccgatgtgttaaccacttcaccaataccgccatcattaacatgaataattatactacattcacacataatatgcaagctataatataaacagggatagtaggaattgaacccacactgacggttttggagaccgtagttctacctttaaactatatccctaaaaaatatggaggagagtggattcgaaccaccgaacccgaaggagcggatttacagtccgccgcgtttagccacttcgctactcctccaaaacaatctaccataagcctaccgattttttaatattattttattcatcaatttccggcgccgacccaagctctgcctgaatcatccagattttcttctcaattgcggttttgagaccaatgaaaatatcttgggtactgaagtctttttcaacatcggatacttcaatgccgtgttggtaaaggtcttccaagtaacgatagccatcaactaagtgtgcgaggcgttctggggttgttttgtcccattcaccaggccagtcttgaatcttagtgttttcggccatttcttttaaggtcgagtaaggactgccatcaagcgcaatcagccgttcagaaatgacatcgagttggctgtcaatttcttccatgaactcatccatcaaggggtgcaacttcaaaaagttgggtccacgcatgtaccaatgcgtctgatggataatcattgacatctggctcaaatcggcaacgagttgatttaatactgctttggttttcgtatatttcattagattgatctcctttcgatatggttattataacatagtggtagcttaatctgaaacgttatacactggcaaattaagttatttatagcccgtagaattaagtcgttttgaaaagatggagacgttatatggtagattgtaaaattaacgacgccgcatcaaaggctataagaacgcccacaagcgcaagaataagaagatatacggcgactcaatcgagttgcgtcctgcggccgtgaatgaccgcacaggcgtgggacattgggaaggcgacttggtcaaaggtattcgcttagctgatgagccagcattaatgacgctcacagaacggtacagccggactgagatcatcgtcaagattcctgactatcatgcgggcacctaccttaaagccttgcaggacacgatcgacgactacggggccaaggaatttgagagtatcacttttgacaatggttccgagtttgccaagttatcagagattgttggaacccagatttacttcgcacatccgtactcgccttgggagcgtggcacaaacgagaacgccaatggactgcttagggaattcttcccgaaagggaagtctctcagagcagttaccctggttgaaattcaagcagtccaatccgcactgaaccatcgtcccagacgtattctgaactatcttcgcccatgcgattactaccgatgcatggcgtaacagcctagaccactatcaagaattcgttatcatcgttgcacttgacttgaaaattgaggaaatccatgattgaatgtcttggacggaatgctttttgaggatattcgtctgatgttaccggactcacttctacgtctttatccttcaagatttcgctcgcaaattcataccaagtacatgaattgtcatttgaaagttgatacaagccatacggcacgtcgttttgaacagcgtataacatgaattcagccaacgtccgggtccaagttggacgaccgacttgatcactaacgactgttaaatgatcatgcgtcttcgcaagatttaacatcgtgtaaacgaagttcttaccatattcaccaaagacccatgaagtccggatgatgtagtatttgctcattgtatttgcaacggcttcttcaccagccaattttgtgcgaccatattcattcttaggtgcagctggggtttcttctgtgtacatttgatcattcgtaccatcaaagacataatccgtactaatgtaaacaagcgttgcgccgattgcttcagcagcattggcaatgttttgcgttccaaccacgttcactttgtaattgattgacttgccaggttcttcttcagcagcatcgacagctgtataagcgatggatgggcataataaaggtcagcgacaccggtaagtacagcgccaacttccgagaactcagcgccattatcggcagtaactgacttcatgattgatccgtattcttgacagatctgggccagctcatagttgactgaatcggcatcacgaccatcgatcaaacgtagaatttggcagcgggattgacgctcgatcagcgttaagatcacactctcttgaccgttgcgcttgcccaccacggtgtccaattcgaaatggccgaactcttggcgctggtcgatacttttaggccgttcatcaatactccgtccggccagacgcttgtgcttgatcgagtgatgatgtttggcacggtggcgcgttttttcgagtagatcaagattgcggacttcaagtaactgggcatcaatatagtggtatagcgtcttggtcgagaccatctcctcaggttgatataagccttcaagtttggcccgtcctactgctgcatcaggcgaccaaccatcttgacgcaaatgagtcgtaaaatagtcgataaaatcagcgacaccgacgagtttcaagaatcgttctaacgctcaaatgacttaattcagctaatttttcttgtgttaatccttttgactttctaattagtgtaatacgcgtttcgtgactcatacatttttctctctttcactaatgattttataaataatcatagatatatgctaaaagagttaacacgtcagtagtccgacaattaggcgacaggttactgacaataattagttatcatgcagaattctgcccgtctgggataatcttgagacggtttaaccacaataattaatttttgaagtttctgatgaattcaacaatatagtcactaaaacttattattgaaaatccaagcaagagacctaacatagataactcatttgataaaaagatcatactaggcacaataaataaagcgccaatcaaaataacaatattttgtaaattatacttgataagagagttaaatcgaggtgtgtatttttgttcatcgcgcataagttcatcgagtggaatattaaatagattggaaatcataatgatattttctttgtcagggtaacttttattcctttattgcgggagtagggtttgaacctacgaccttcgggttatgagcccgacgagctaccagactgctccatcccgcgataatataaaggagaatgagagattcgaactctcgcgtgggcagaacccacctgacggttttcaagaccgttcccttcagccagacttgggtaattctccataaaacatataaaatgtaacattgttacaatgacccgtacgggatttgaacccatgataccgccgtgaaagggcggtgtcttaaccacttgaccaacgggccatacaaaacggagaaggagggatttgaaccctcgcgccagtttcccgacctacacccttagcaggggcgcctcttcagccacttgagtacttctccatattatttagataatgggcctaaatggactcgaaccatcgacctcacgcttatcaggcgtgcgctctaaccagctgagctataggcccatgaaaagcgggtgacgagaatcggactcgcgacaacagcttggaaggctgtggttttaccactaaactacacccgcatattcatgatcaacttgtaagggggtctggtagcccagtgaactatgaattctcttcctattgtagaaagcatgcacatattcaaaaaggacggcagcggcagtttcataatcttcaaagaccggcactggataaacacattcctttttgaggaaagcgtgaaaggattccattggcgcattatcatacggataacccttacggctgtatgagtggcggatatgtagctcagttaaacgttgattgtaatcatcgctggtatactgtgatcctaaatccgtatggataatcaggtccccagtaatggttcgatttttaaccgcgctttcaagggtctttaagactaaatcagtagccatcttttttgagaacgaatagccgataatccgtcgtgagtgcaggtccatgatggttgataagtaacaccagccattacgcttcgtttgaatataggtcatatcagcggtccatttttgatttaaaccagtggtcgagaaatcctgcttaagcaagtgcaatagtatgatccaatttttgaaagaagtctccgattttttcttgttctttaaaatcagataccactgatataatcaatttatttagatccggtagatttacagactgaacagtcgttccggttttaatgattttctttaaaatatatgcttctttcgattggagttcagcgacaaaaaaatttacgtttaatttggattgatcaaaaagcaaagctttgatatcttgattaattgcaacatcaatagtcggtatgcttaaaggaaatcgcttagctaatattccacttctagtaacaattaatggggttccagcatctaccattctagttttattatcaataatcgccttttttgttatcgtatatgttccatttgagacgtatttattcttgatttcttgtgacgacaaccagactatatttccattccaatactccgggttatctttaaaaggtgttgccccaccaattaatttaattttggattgaaattccactttcggctgaaccgatcaccgtcaacaatttcttatgaattatctcgatgtcaaccttatcaggctgaattagcacaaacagatgccgaatacaagcgatcacgatgtggtcggaaaactaagctgagcgatgagttaaagcaaaaaattctcaaccatttacgtctaagctggtcaccaggaatgattgctcacgaatttaaactagctactaaatctatttataattggctaaatcaggggagaattggtttctccttgaatgatctacctgaacatggcgtacgccaacggcgtaacgttgaccaacgatccaaatataatcaatctttggggcgatcaattgaacagcgtcccatgatgattaatcaacgtaagcgcatcggcgattttgaactagatacagtcgttggtcctcgtgggcatagtaaggcagttttattaactttaatcgatcgcaaatcacggttcctttgggcataccggttaaaagatcggacga
